United States Patent Application Publication US 2026/0058010 A1 - sequence listing, part 43

SEQ ID NO: 491 - DNA, 1051732 bp, Homo sapiens
  source 1..1051732: mol_type = genomic DNA
accttcttctaggccggtctgtgcatgtccttgtaaaatgacattttcagcaaagaatcctgcaaagtcagtttagcaagagccatcccccccaattcttgatatctgatcaccttgatattttttcaccctcgatatcggattgggtccctcatcctccaccatccccaggtgatggcggtcaccctggcttgccttcagcaagaaccctgttaggtgggtttagccagaatcccctgaccctgaggcttccttttggtaactctccatccactcatcccagcccactccttggctgggaagccccgctgcccatgtggtgtttggagctgagccctgctagggtttgagtattggactctgcaaacctcatgttgaaatctggaggtagggcgtaatgggaggtttttgggtcatgggggtggatacctcatgaatagattaatgctctggggtgggggacaagttcttactctggcagttcccatgaaagctggttgttaaaaagagcctggccctccctccatgccatctcctgcttcctctctctccatctgagctctgcacacacacggggcctccccagatgcagacactggcgtcatgcttcttatacagcctgcagagctatgagccaaaaacctcgtttccttataaattgcccagcctcaggtgttccttcagagcaatgtgaaatggacggagacgagcccagtctctctcccccactgcaaaatcccccggcactctccctgtaccaattgtgctggtcctgaatcaagttttccttcctgtgcattaacaaatatcattcaatatttgtttcttaaacaccaagctcctctagctggagggcactgcttaggagttacctgattttgggacgagcccactctgctgtcctcggtctctcactgttgccagtggagatagccgagggcaggacggaaggttggtcgctgcaccacgccccggagtgcctgcctctttgcttacagtttgaatattcccgctgcattttcctgccaggtggaggggtgtgattgtgtggctggtggggacgaggtctcccttcccaccaaggacagaaggacagtccctagatggaatcggagtgctaggtgagagacattatgagcctcactgggtcagggcccgttgttagcatctaggactgagaatggggaggaagggggcatctcccaccccagggtgccctatccaggtggtgccagtgcacggaggggcacggagggcgtgtgtggcatggatgcgatctgcggctccttactgagactgtttaatcctgttttaaagatgaaacctcagcgacaccctggcccttagtacacatctaatgctgcagataaagtagcaacatgacctggagttctaggaaacgcccacgctttgtttcagcatctacagtccagtggcttaggaaacaaaaagacggatggaaacaattgttcctcctccccaaataaagaccacctgaatgtgaaatcagaagtttaatatgacacaattaaatatatttgtatatctcacaccggaggtttctcttcaaacataaggagttagaaattacaagtaggcatatgcttcctatattcagataaattcatttcgattaattaaattccagatagagagaagtaattttggaaaagaaatgatagctatattaaagcagatattcattacaataccatgtagagacataagcaatattttggcatcattctgtccgctcagtaggccgtgttccctctggtagggcctttggagagtaccatctatctaagatggaggaatgctgtgggaagggcgggatggaggtgcgttttctacgctgaaccccacacaggaaatctgcagcccacacagctgcctctgtgccgccttccatgtgatcatcttggtcaatgaagtgaattgtcctatttctggggtagggggtgatggcgaatcggatactcaaatgttattttgtcaaatccgaatcatctctacgtgcttaggtttacatgatgtcaaaacacgtggttcattaagtgatcccgggaagaggggcagggccggtcggctggtttctcacttcccttccaggctctacgcagtgcgtgcaggtcgccctgatctcctctcccgggagggaaatgctcgcagccctctccgagttgccctgatctccttctctcccaggagggaaatgtcccctctctggggccccacaggtccgggacgtgcctggaggagccagcgggggcctggcagggttcgtgtgctcccggggaccctcatagcttgctcaatgcccagatttgttcttcctggttgtggttatctcacaggtaagcattcacgggggcatctgttttcataacgtagaaatcaatattttaacattaaaaacacatctcaatgttggggtgcatctgtaactttgcaaaggtgaggtcaggggagtgccagcctcaagtgggcactactcatggggtgcacaggtgtctgcccccggggagcccctgaatcactctgcttgggctgacaggtgtggctgacggggccgtccatggtacccggcgcagtgttgatggagacgcagcgaggagctgtgattgtctcacttgccccgaagctgcaggacgttcagttctgtccctgcggcttctcccaatgataaactctctcaaagagaaatgccaaacgtgccttgtgtgccgggcggcctcactgagtgctgccagcttccccggccactcctgcacagtggatccaccctcccgaaagtggcagatgacaagcacactcttcctggaaaccgcctcgaacgtgctggctactgcattgttaacacaacttcaaccaagaaggtgaacgggtgctttaagaaaaagtattttttttaagcaagtgaaaattgatgaaccgattcccctccacccgtaactggatttttccacaaatctctctttattattgtttgattaaacaaaaatacacttttaactgctaaactgcgctgactacgggagagctaagggccctattactatgcagttataatagaagacacacaattaaagtcagatcatgattcctgacaacatccgtggggtgggggctcccctgaggcccctgaggctgccgctcactggggaagggccttgaggatggcgttcacctcctcagccacggctgtcagcgcgaactcaaactgctcctgcagggcgagaaacgagagaagtgccaatgagagcggcgtccccccgactcctgccacagcgtcggctccctgcagatgaaagcggcgtccccccttcccaacgcagcatcagctccccgggccatttcgcagaaagaaattgtttagcaaaaaaaagcaaaaggctcagatttccttagaaaggacagtgtacccttcggtttgggagacacaacagtgacacatgtttgagcttctctcgcactagaaaagcctcatctttccccctgcggggagaagctgcccacagaagcagcgagaaggcaacggttcctgcgtactgccctgtccttctgaccctacgactccacgattcctcctcacagccacccgccttggtggacggtgtgaggggcaggtgcagacactacaaagacgtggccattaaaactcacaatgagggccatgcttgggcgtttcctgtcctcggaagtgtggtgttatcatcgcttttgaaatccacctgttactcagaccaaacccactccgttccacatgctgagaaacctccccttgtccacacccctcctggctcagggcatgcgcgtccacagccacttgggcaggcacacctgaggggcacccctccctccacggacagcctgccgagagcatccagtgggcacgagggacgggttcacgatgccaggactattcgctcctccaaagaccagggcttagcgccggagagcgtatctgcctcctctcccacagatgaggtggataaatgctcatttcctcttgctcttcagtttccacctcaaaacactgctatggaaaactccaaagcaggccagcagcactccagctacagctgagaacgcgtggacggaaacaacactgttacccagctaacaacttctggaaggaaagccctgttgacagctccaatacttgatcatttaaggaacagggcagccccaagccaaaaacgatgattaatttccagttttgaatgtttagtgcataacagaaagatggaaaatagcttgaaccgagacatcagaaagtcaaaataacgtgatgctcattctgagacaaaagacagtttctcctttcatattcttctgccctgatgctgacggaatggtctgctggactctacctgcctttggtagtgtggccacgcggcctcttagtgtacgtgttagaacctattattaaaggagtcaactgagcctggcggccacctcagggtgggacccggggagatgtgtctgcctgcgccccgtctctctcccctctgcactgccagagggcacctttctgctcctcgaaattacgtgggagctgcccctgtgggggcaggggctcaggtcgggctgtgccgggaaggtccgcaaacgttctgtctaaatgctgactcctgcccctcccacaccaagtgtgttcgatgaaggtgctgtttaggggatccaggctaaatacacaacagccattcagaccatttcttccccagtgctgggctgccagtgccctgaggctctgtgagggcttggagatgccaaaaattaagcgtggctttttgggaagcgaaatgcaagtgtcatctatctatttacatcttccgacacactggaaatctagcctgagaaatgatctttaaagggaagaatagagaagcgctgccgccccgcagccccatcatgcagtggaggctggaaagcgctccacccccagggccagtgctaatcctgcagagctgcccagcggcctctcaggcagccacttgcggcatccaacaggaaagcccaatatccatgctatgggggaggggacgggcagggggaactccaccagggtctggatcataactgtttccaacactgcacagtcaccggacagagcagcaggaagggaaccgggccacagagacaggtgctctactcactggccatgtttggcaattgttaccgcactgtttagctcaaaggagaagctccaccgggcgtgtgggctggtgtgtgccgtgcaccttactcagagcccactgggccctgtgggcgtcggctggcaggaggagggggtgcttcccggaggggtgctgtgagcctcagagctggcgtttgaggggacaggggcttgtggatcatcttgtcctttatcgtgaagtgtcagctgcatgcggcgccgggatgtagcacccaagccctgtgggtcctcgaaggtctgtggccacgttctgagcagaatccgctgagcaagtatcacctagaaccatgctctagatcccgggtaggctgggaaaaccccagcatttggataacttttatgataggagtttatttcaaaggagtaaaatacaacagcaacagatgaccagatgaccatcttagcctaaactgcatctgagtgccagcagtctgaacaggaggggtgcaaagcctcctgggtttgcaaagacaggacattcgagaggccgagtcaggacattctaagcaagaaagcatttttgaacacatactacaataaaatttgaggcctgttggagaaagatcccacggcttcttccagtagaactgcacccggtggagaagtggctgaggtgggacggccgagccaggctcaggccaggtcaggctgtctggtcaccacccctgggtccacgctggacagcgagtgggaacgccccttctcaggctgtcctgggacaaccacggggtgcccacatagttggtggagggatggaggctgcaggagctgccatggctctcggacacccgctgctggggtaagggtcagccagggctggaagccgtggagctttgtggaggctgcttggatttctatttgtgcttatgtttatatttgtaatccttcaggtgtaaacaaaggcctgggtggagatgtacaaataggaaccttaaagaggacctcagtgatcgtgtctctgagccacctgtgccctccaggaggctgcacacataactgcggggcagcttcccccagcacctctcaaaagggggtgaggatgacacaccttcctgtgtctgtcaccttcagcttctcttttcacaaaagtagacaagctccaagccacaccgtgagagttgagccctgcccaagttagggactaggcattgtgtgtgtgtacaccagggcggagggacagagacggagatggagagagatgggagacagatggagagagacagagagaggtggagagagatggagagcggtggagagagacagagagaggtggagagagacggagagaggtggagagagacggagagaggtggagagagacggagagaggtgaagagaggcggagagaggtggagagagatggagagaggcggagagaggcggagagagacggagagaggtggagagagacggagagaggtggagagagatggagagctacggaaatgaacagtttcaatggcacgggaggccttgggagaagtgggctgcgggcctggagctgatgtgtgagcgtggactgcgctacgcgtgacagaatccgtgtctgtcactccggtgctgtgctgggttgggaagataggagcatgtctgggcaacgccctgcttctgggacggaggacaacaccgggtacgtctgaggaggaggctgaggtcaggctttaggacaaggggctggtgcagaagaaaatggggaagaaactaaaatgcagatgtgagacggcaggttggggagagtgacgcacgggcagcacgtggacatgcgaggggcctcccgtccagtgaggagggggcggggcctcccgtccagtgaggagggcatggggcttcttgggtgtgggacacactcatcactggctctacttctggaactgacagatgtaaaagaggaaacaccattgtgggcaggaaagtgttaaggtccttggtgaaatgggaaactcttgagacgtgtggagggaaggaagggaagaacccatcatctaccacagaggcatggacgggagagaggggtgatttcagccttgtctggcatcccttgtgtctgctgagggtgtgtgcacacgggaatgtgtgcgggtgtgtgtgcgtgcatgcagctgtgtgtggatgtgcatcgtgtgtgggtgtgtaggtgtgtgtgggtgtgtgcagcagtgcaggtgtgcatgggtgtgtacaggtgggtgtgtggatgtgtgtgggggtgtgcacagctgtgcaggtgtgtgggtgtgcagggtccatgactgtgtgtgggtgtgcactgtgtgtacacctgtggaggtgtgtgggtgtgtgcagtgtgcatgggtgtgtgtgtgggtgtgcaccccgtgggtgggtgtgtaggtgtgtgtggggtgtatgcatgggtgtgtgcaggtgtgtgggtgtgtgcagtgtgtggctgagtggtgtttgtgggtgtctgtgggtgtgtgtgcaatgtgtgggtgtgcgcagtgtccgtggctgtgtgtaggtgtgcactgtgtgcaggtgtgtgcgtgtgagcagtgtgcacggctgtatgtgggtgtgtaccacatgcgtgggtgtgtaggtgtgtgtggggggtgtgcctgggtgtgtgcatggggatgcgcagtgtgtggctgagtgtgggtgtgcactgcgtgagtgggtgtgtaggtgtgtgtggatgtatgcatgggtgtgtgcaggtgtgtgggtgtgcagtgtccctggctgcgtgtgggtgtgcgcagtgtgcaggtgtgtgggtgtacacagtgtgtgtggctgagtgtgccgcctctctggcggctcgtgtggtgtcaaagcccgcactgccgttcagcccctgggtgcctggacttctcttctaagatgatggagtttgtggtcggggactgagttgccaaatgctcaggtgggcgctggtgaaacattttctattcgacccaaattccagggaggaaacagctctcctgaggggcatcttttttaccacaacgatgatgttttgctgtcagggcctgcggtcatcctggtcatggtctccgggtgctcaccctcgacggctcgctctttccttgtcttcagttccaaaccaggcgacgtgacttcctccgttcaaaggagctgcaggcgcctcctcttggcttcgtagaagcaagcattcagattggacagcagcattttgcccaaataatttttctatctttgtgaaactgaacttgtaggggaagtttagtctcggggcgatgttgggcagcgcagtcacggattaagatgtgatggtgactttcgcatggttccatttccttatgccttgaagttccaggagctgaatttatgtgcatgctccaagacagctcctgaacacacaccctgaggaagagggtgaactcctccggacgcccagtccaagaaggaagcagctaggaagctgactctgttatctggagtgcagaaaacggagcttcgggtcaccaagtgatctgggcaacagggctggggtgtgtatgtgttatcatcttgctatttatttatttatttatatttaagttctgggatacatgtgcaggacgggcagctttgttacataggtaaacgtatgccatggtggtttgccgcacccatgaatccatcaccgaggaattaagctccgcatgcattagctatcatcctgatgctccccatcccccttccccactgacaggccccagtgtgtgctattcccctcccagtgtccatgtgttctcattgttcagctgtcatttataagtgggaacaggcagtgtttggttttctgttcctgtgtttgtttgctgaggatgatggcttccagccccatccatgtcgctgtaaaggacatgatctcattcctttttatggctgcatagtcttccatggtgtatatgtgccacattttctttatccagtctatcattgatgggcatttgcgttggttccatgtctttgctgccatcttgccatttaaaaatggagtagaacggaagacctggcatgtaatgattgtgactgtggcttcctctttctctgatgagtcccaaagcacctcacttcacgaagggtcctgggaccaccgttgtgcacctcagccatctgtgtgccaggaagggcttgttctggcgaacaggatacatacaatgggaggcttggagggtttgctccttgtgatttttttcacttttggcaaagatatccccttgcgatgattttgcccagacccatcctaaagccagtgtgtgttctgggcaaactcacctgtctggagggaagaggctgcctgacaggcaggtgttctgggtgaactcacccgtctggagggagaggctgcctgagaggcaggcagaggtgtggggaggaaactactttgaatttagatttcctggggcttatcccagagtgggcctcactgtggagtcacgaacacacctgcctgaggtggctctcgctgaccattcctggtaatgtgtgccccgttctcccagcctccatggcctcctctgtccagttcagagccacctgaagctcacgggatgcagggccagccagaaggtggtatgtgccagccttgacaaggccacctcttttactgctaggcagccagtacaggaggatggtcagtgcggcaagatggacccttccaaggttggacccttccatggcacaaaacctggaactccttggtacagagaggccagacacacgtcaacctcacgtccagttcctgttgagccaaagctcatgagaacttttttgttttgatggctgttgctgctggaacagcagctgtcccgtgtcacctcctctctcgacagcctcgcaacacatgccgaatgctgttgtgaacaagcagaaggaaagacagacatgtgcacagtcccagcttctccccgcgggacactgagtaaccacacagggaaaaatcatcacgcagccacgcagaagcctccagacacacacgcctcagtgggtgtagatgtgccgctccctcgtgagggacagtcctgccccctgccctgaccatgggggacgtgggacacgcctagacaagagacgttccacaaagagcaaggccgctggcgctctagaagacctcacagccgtgaagcgtcccggacagcagaggaaccatgatgcccctcgcgtggccgccctgggcgtgtcctgctccaggggaagctccctgggggggcgcgtagggcatcgctgggcctgttggtcagtggtttgcatcggtgctgacttcctgggtttggtcactgcgctgtggttatgtgaggtgttcacatttggggaaacttggtggagggttggtggattatttctgcattttatttatattttttgcttgggaggctgaggcaggagaatcgctttaacctgggaggtggaggttgcagtgagctgagatcgtgccactgcactccagcctgggtgacagagtgagactctgtctcagaaagcaacaacaacaacaaacaaacaacaacaacaacaaaaaccgaataaaatatagtgtcccaagacttacaaagaactttcacaaaatcacgtgatggtcctaccagttgcacagagagggcgaaatgaaaccaaggagcagagaggccaaaggcacaccaaccccagcctcagggccagagagaccagacacacgtcaacctcacgtccagttcttgttgagccaaagctcaccagaattttttttgttttgacctctgttgctgcaaactgggcctcttcagcaagcatgagggattttgggtgctcaaggatgctgtgccctgggggcctccacaaagcgcaggccccggagaggccgggcagcgctcagagagctcagaacatcctcctgagggttctgggatttatcgtcaacctctttctacaaaaatgcagcgttctccccccacccccaaatctagtgaatggaaagagccagtggatcgagttcctaggacttgagatgtggctgcatctggaggtgttgcaggaaacgccagtggacctttgggggcccagaagtgaccccgcccatgcaaggccggcatggacgaggccggtcagagcagagcaatcggtgtgcggctcacattaaaccaggccctccccgtgctcctctcaggaacacggccgcagagaggcaccttgaatgggtctgcgtcccggaggagagactgacagtaccttcgtctggaccatgccgggtctctggtccctcaagtgctccagggtcgctgcgatatcaatctctttagcacctgcaacaaaccacaaattgggctgagttcagagcacaagataatccatgccacatctgtcaatctcctgctagccacgttccctctgggctgagaggccaattgaaaattattacgctcatccctcagccggctggcaggcggctgcaatttcagtgttcatgtagaagacgaaggcaggggcagctttcattagcattaattccagaaagctgggctgaaaaattgttataagatgcttaccaacagcaggccgtcaccgtcagaaaccaaagctgtactggttttcttttctttcttttctttttttttttttttgtgacacttcagggaatgtagtacctcatagggagccatatacgaactttaactttgattgcataggattacttttttatttaaagaaataaaaaatcagattaatttagattaatggactcaaccttaatattggcttttaactgtagagttttctgctttttaaactcaaatgttccacattttgggactgggtaaaggtgcccgtagctactcccagctcagtggttcaccaaaagctccatcctcctgtagacagcaccgatctcacggcaggtgatgctggctgcactcaaatcatgctacttaagttttaaattttaagctaataattaattcagcacatattgttatttttccattttgctaggttctttagtagacagataatgagcaagacagggtcccgacctctccagcgtgttgcagttgagaggggcagacaggacacagccgccaggatgagaaacacagagaagtgtgggatgaggagcaggaggcagctccgaagcgggtcagaatcccacagggaaacccacatgggtgccaggcacttcatgtcacctctaccgaacacggtgaactgagaactgtggtcacccgagtcgcagatgaggaaatagagacgcggccaatggcatgtccaagccacagacaggaagaagccgcagccattggaaccccaactaccgtgggcaggacagcgctggccgaagacctgaggaggcccgggtggcccagagtcaggtggtccccaggcctttctctccggccgcaacctgagtgcacaccacattcctcgcccagcgaatcaggagagaagctttaaaattcccgaggttcctcaatttcctttccctgtggttctgtggcttcatggggtggcaactgtgaagccagtgggggctcaggctccaggaggatcatcccagcagggtagcaggtgcctgcgaagcacctccaagtcacagcaggtgcctgcgaagcacctccaagtcagaactgcgggcagctaggagggaacggcaggggtggcggggaggcctggggaggacacacgttggaaccaaatgtcatgtttgcatgaagggagaacaaagcaggtggtgtggagaatctggctgtcaggacagccccacagcggctccaccagggaggccgggcgcgagatgaccaccccacctgccctgcctggctggtgggtctccccacctttgagcacagaagatggagacactggcatttcctggcaggaacagggctcgtggtgatgggagccactgtcggggctaagctggccgtccctccagctcccatcccctggttaaaggaccccattctcctgggcagggaacaccatgagggccaccaccttttaagccagagcctctgcaggcataaaaggcggctttcttttgcggcagcccgtgagctcggccaccagggaactagctggcagctcacgcgggtggaaggcggggtcaggtgcacgggtttgcttaattgctccttttgggtctccaaaggcctaaaaagtcgacaaggctacagtaaatacaatcttgttttaaaagaaatccataaatttaaaacagcctgacacaaacgggtgagtttgtgaaatggtagagaggaagggaggaagccaaaggacccctcctgcggccatgactgtggcggccaaggaagccgcttcctctcctcctcctcctcccacggacactcctgcagttggtgcctacacagcagaatcatggcagaaacgacgcaggggaactggcctctctgagacaagcttgtcttatgaaagtcaagtccctgcatggagagcgccaggttagtctcagtgtcactgcacaaacattcgtgcttgagccaaaacaactcagaaatgcccatattgtctgttgcacccgtgactgtacctttggtaggagctgtggcttctggacacattgaacccagaactgtgctgcaatttaaatgtgaaaaataccacaactgtaggcagaaggataaataagctgcaattcacagcatctttcaagcatctcaagttggtatagaggctcaagctaaacacagaccccagctggggctcacccaaaggaaggccgctggccaccatgtaccccacagacactgtgcagcccacagccagcatgcaccccacacaccccactatcacacaccccacacaccccacagccaccacacaccccacgcaccccacagccatcacacaccccacagccaccacacaacccacagccaccacgcatcccacagccaccacgcaccccacacaccccacagccatcacacaccccacgggcaccacacaccccacagccaccacacaccccacagccaccacacaccccacagccaccacacaacccacagccaccacacaacccacagccaccatgcaccccacagccagcacgcaccccacagccaccacgcaccccacagccagcacgcatcccacagccaccacacaccccacagccagcacgcaccccatgggcaccacgcaccccacagccaccacacaccccacagccagcatgcaccccatgggcaccacgcaccccacagccaccacacaacccacagccaccacgcaccccacagccaccacacaacccacggccaccacacaccccacagccagcacccaacccacagctggcacacaccccatgaccaccacacactccacagccaccacataccctacaggaaccatgcactctatggccactgcacaccctgtggtcactgaccacacaccccacagccaccgtgtaccccacggccaccacgcaccacattctgcttgattggctctttagaaatcatccagaagaaatggcaagacgtttgctgtttaattaccacgtgtaaaaaacaataacataactaaatagcttcccgataaaaataattctatgtatttttacatatttctatgtacagggaaacctgccctctcatttagaagggaagtcatcgtgcaaagcggctggccgtgtgaataatagctcagaaacggggaaatgtacaggctccatctaacactgggtctcgtaactcctcacacaccccaactgctgacctcagcgagatgctgacctggaccacgtggggaggggatgggccgaggtgcaggatgagggaggctccatgtgctggggcctcacacccacgtttagagcacgctatttgtctttggccatacgctgctgggtttggaaaccgggttctaatacacaaaatgtattacaaccagtcttgtgtaattaaaaacgtaagatgtctattggcttttaagaaattttcccaaaaccaaaaaaggtgagttaaaggcaggagtgctggggttgccgacagacgtcgagttgtgtcacatgacgtggggaagctcgggctacagtgctgaggtgtgggtttccgctccgcgtgcctatgctgggcctggccgggaagctggatgggccagcctcacctctggaggggctttcctcccgtttccagggtccagtgagggtccagtgagatgacgcatgattacgtgtaatttacaaaacacatttgatgctcaggcaacctcacagatctcgtgagcaaactcttctgggagacagtgaaatccaatcagttatgttctctgaagccttccaggcacgaggacagcagcggcttctacggggacccctcagctttctgtctcaggagtcatgaacctcaggagaagcaagtgtggtataaatagtctgactcaagagacggggagctctcagccctcctgagacatcacgttgagggttcatctgggccacagagttaaagcctctctccgttaggtggctttagggtacttgctttcagtccctgaaacttcttttttaaaacgactgtcaacagcaatgtcatctgaagggctgtgtgtatgatggtgctagtgggaatcctgggagactgtccctcactggcaaccgccctcccgaattctggccggagccatgaagccgtcaggagctgtagcaggtgtgggcgaggaaggggctctccctccgcgtgcactgatctctggagatggctgttgctggcggctgtctcccagagtggcgtcgtcgtcctcacataaaatgtgatggataaagtctctcttatttcatgacatcgtggctccctctcaggctgtggtttgtgaggaaaagtgaaaaaagggaaggagaaagacttgccgggccatccccagacaacatggggagaaccgggcggaaatacaaaatgacacgggagcgtgcctccgagtcgcgctgagcccgagaccaaaactgaagagcggaggaaacggagttaacgcttaaaaagtgtgcagcaccagcattaggtccataatgatgtagcaggaaaatcaactgtctgctgtggacggctcctgcttcttgcatgccaggattaagactaactccttacttcaagtgtggtggagacagaagctttcatagagcccatgcatgagatctttcataagggacagaccctggatagccaggctcaggctgggcgccgtatcctgcccgctctggtgccctcctgagcatgggtacggccaggccgggcgccggatcctgcccgctctcgtgccctcctgggcatgggtgcggccaggccgggcgccggatcctgcccgctcgcgtgccctcctgggcatgggtgcggccaggccgggcgccggatcctgcccgctctcgtgccctcctgggcatgggtgcggccaggccgggcgccggatcctgcccgctctcgtgccctcctgggcatgggtgcggccaggccgggcgccggatcctgcccgctctcgtgccctcctgggcatgggtgcggccaggccgggcgccggatcctgcccgctctcgtgccctcctgggcatgggtgcggccaggccgggcgccggatcctgcccgctctcgtgccctcctgggcatgggtgcggccaggccgggcgctggatcctgcccgctcttgtgccctcctgagcatgggtgtggccaggccgggcaggggcacaacgttggcattgataaagcacctgctgggtgggtagggtgggatagggtgggcgtgtgtcccccttcacttgataaaaggcttttcttagtgtcaaaggattcatttaaagcctccactgcatagaaagctccctctagtgcatttaaaatagaattctctcttgaaaaatccaattttgctgacaaggtgaaggagcagctaacgaaagttaaattccagggaaacagaaaggcccagtggtgtgacgctgacatcgaaaagcctgcaaacagtcgaggagtcagcgcacacacaaagaaaatccagatggaaggaaagaaaggaaccttaacgatgtctaccggggacagagcgtggggtccacggagaagtcccaggcgttttccacctaagaagcatcatggtgattcaaacaccagggaaatgaatggactcagtggagccactttctgctacttgaccaggtttaattcgagttgtccatgtcgggaatctacagggaagtgacgcaggctgccatcttgctcagcaccccagtgtggcgggcgccccagtgtggcgggcgtcccagtgtggtgagcaccggccaagtcagtttgggttgggctgcaccctcgtgcctgggacacccaggaagacccacctctctcgtgttagtggaccagggaggcagccacagacaccaggctctgcgtgctccgctggcacccgaatggccactgggtaccatcccgtgccaagctcagcaaatgtaaatcgctctcattgttattttctaattcactcagggctcattgggttaaaagtttatacattggttaaatacatttgtaagacaacagagggtttttttttagctttagataaaaaatgttaaccattaaacaaaagccattaaaagaatattagtattaaagtattaaaactatctgtcacaatgaaagaatccatttgaagttaaagaaaaccaagcaaatatgccaccggtgtctctttccaaggcttgtttgatttctcctggactctggctcttggctgaccgagctgtgtgattcagctcatggccctagaccacatcctcccagtaaacagtgaacacggacggatggggtgtgccgggagggccatcgtcgccgtctcctgaccgtcattcttccgcatggcttccggcagcctgttcatggataatgactgcatgagcgcaggtaagttttattacaattttactcagaggttttgcaaactgcagggatgcaatgtattctttttttcttgaaagtaaaaacgacaatgtgtgccaagtgttcaagagagagaggcctttacttgcaggagaaaattttctcaactctaccctctggaagaactgaagaaaagcttggtcctaactaaatgcattcaaatacatgacgaatggtgattattaagaatccagataaggaacgaagtggaacagttcccgtgccccaggagcgcagagctcctcactcacccaggctgcgatgtttctgctttgtctggagctcacgctgtgggaggactgggctctgaagggcacagacaccccatctttctagctctccatgtcagccgaggtgaccccagaactggactgggtgcagaggtcaagctagagcccctcacgtctggcagagcaaaactcggctcaaggtaactgtggttggggatgctctgggtgccccacacggttcaagccctccccagacctgggtctcagggatgccacttggcactgactacacactacacgcatgcagatacatgtacatgggtacacaggcatgcacacaccacacaacactcacccacactcacatcatacatatgcacatgcacacacacagaggcatgcacacacccaaacaacacacacacccacactcacactcacgtcatacatatgcacatgtgcacacacacaggcatgcacacaccacacaacactcacccacactcacatcatacatacgcacatgcacacacacacaggcatgcacacatcacacaacactcacacccacactcatgtcatacatacacagatgcacacacatacacacacaggcatgcacacaccacacaacactcgcatccaccctcacgtcatacatatgtacatgcacacacatacacattcatgcacacatccaaacacacacaccccacacatcatacatatgcacatgcacacacacacattcacacaaacatgcacaccccacactcacatgtcacatacacacatgcccacacacatatacacatgtgtgcacatgcccacactacactcacaccccacactcatacatatgcacatgcacacacacatgcacacgcccacaacatgcacatcccacactcatgtcatacatatgcacacacaaatatacacacagccatgcacacactcacacaacatacatatccatgctcacatgtcatacatatgcatgcacacacatatacacaggaatgcacatgcccacatgacatgcacaccctacgctcatgtcatatgcacacacatgcacacacaatgtcatacatatgcacatgcatgcacacacatatatacaggcatgcacacatccacacaagatgcacaccccacactcatgtatcatacatacacacacacacacagatatacacacaggcatgcacatgctcacacaacatgcacacccacactcatatatactcacatgcatgcacacatatatacacaggcatgcacacaccacacaacacacacaccccacttacataggtcatacatatgcacacacacacacaggcatgcacacaccacacaacactcacatcctacatcacatgtgcacacaaacacccacacttcacactctcacacaatacaccccacatcacacatgcacatcctttatacctacattcaggatcacacacatacatcatacacatgcatacacacagaacactcacagctcacactgcacacaaacattccacacccatatcacacactcatacaccacacacatgcacacacctatgtgcatgcacacacaggtacacacggcatgcataggcccacacaacacccacacccatcacacacactcccacacacacacacacacacactctcctgggccttcagtgctgagtttttacttcacacctttcctggatgatcttaactaaagacttatgaaaattataagcaggtttttttttgctgaccttctagataaattatattgtctatgttgtaacatattgctgggatcaaaggaggcaaatctgcatcttattcacttgaaaatcaagtagatcagaatcataacaaactagctatttcttatgtttttttttcctttgaacaaattctaaatccttcttttggagaaactgaaatgcctccagatccttattaaaaatataagttaaagaaaatgtagaagtgtatgaatgagtactgtcattttaaagtcaccatccccaatactccaggaggacagggaattgtgcaaaatatcctggtaagtttctatcgactgctggaccatcccataatactgttgaggtgctggcagcatcaacgcggagacaccggacctctgcacccctgtgcaggcgagcacagcttcacaattcaaggggggattgttaaaagggaaagacgaatacgatggctccacaattccgagtcctatctgtgtgtgaacacgtgcacattggtgcgacgcggtgcccaccgcagtttgctgccatcccacctacctgccctgcacaaccagtgccagggcaccggggcaggaccgagatgcaaacgcagcgtctgtgctgacagaagaggtttgggagcagcacgagagccccaaggcaggggactgctgaggtacatcctggagcatccgtgtgatggggcacacgcagtcattcccagatcagtgcagagcacacacacccacatgggggcctccacgatgtggctaggtcctcaacacctatgtcagaatcaacaagcatgtgcggtcaatggcgttcaggaggccgtctgcagctgagtaacaatcacaccaaattgtgaatattgaacaggtggaggagaacaggagctgggctcacccagggcaaaccttctcatgctgcctggaacacgcacacaccacttgcaccttttacccaaaaggtgctcatgcactggtccagcggggatgcgtgaagcatgcagccagctcccctcccaggccgcactgactgctggtactgctgcttccgggggcctggcctttacgggggtctggcaggatccctcctgcaggtgcacagcccaggctctcctcccccttgctcctgtagggccggcagctgcctcggtccctctgagtctattttgggttcagaaagtgcctgggctggggacagggccagttacgcattgactcagttccgtggcttacagtgcaaacacagagaccttgtcccatgcccgtgggctcatggtcaaggacactttgcatcatttgacctcggaaacaggagaaacggaagcacaggccaaggagggagccgaggggccgcgtgacactgcacgggatcgctgcccttcccacacgcacgttctgtctcacgcagttgctgtgcatttggaagaatcttgcatgaggattactgattccacgggacagcgtgtgaccccctgcagcaccctgactccatcgggggacccccagcatcctactcaacactacgagggagccccactgccaaaaggccaggctgcatgtgcctggacttcaggcgctaggaacggacgcttgggacctgctgcctctggggacagcccctcagggtctggacggaggatgttgggcctgcgggctgggcagggatgatgctctgggaggtgcctccaggacaacagggagacccctgcagccctccacatgggcccctggaaacccaggatagggagtggcagaacacactggcgggggctggacgagcagaggaatgagggaaggacagagtgggtgggagcgagagcagaggagatggaggggggaccacagactgtgtggggagggcagctgtgccgcaggaaatggagcaaccaggctgtgagcaagatgcgcacagaggacggagaggacccagggactgagatgaaggagtgactgcccggcagcagggagcagaatcaggcaggcaagtgcgcaggccgggccagcctggaccgtggagctgtgtctccaacgggaaccttggagggcaggactttgatcccctcccgaatttccaaacaggagtttgaacagaaacatgtggactcagggaccagtgcttcgggcacatcctgacagcgacacagctgccccgacagggctgtggccccccccgccccgtctctctcctgtgttctctcccacattctcaggggccgcctgctgccagctccctcgctgtggcctcatccagctcctgctggcgtggtctgacccctaaatgtgtgccagcaaggcctgtgttggagggaggggagggcctggatgggcctggatgggctggtgccagcacccgggaccaaggagggagcttgcagaagggacagccctcggccaggtgggacctgaacgacattttgcggcatccaatgggcctgaggtgtctgcgtgaccatgaggagaagcggaggacagcccaggtgaggacatcagacccaggagtgggtgaggagcccctgcagccaggctatgtgaaccctggctcagcagggtcagcctgaccccttgaaggtgggagaccccttgaaggtgggagacctgtgagctggtacactcagtgaggacggctccatgcacagggacgaagacccccgaggagaccatcgaaggatggtgggcagtgctgcccacacggatgcccagagcgtgttccccaagaccagcgggtctcatgctgtccacacgctcccaccaggcgatcgacaccagggtccgcctgtgccctgcctgggtggggtcagccacgcccccggaccactgctccaaccagcgttcgtcgtcagccccttacacgggacagggcactgcagaccggcccgggaacctggggacacctcacgccccacatccctcactgtttctcttgcaccagaatagctcaggggaaggaaaggcacagaaaataaacaacacacagcagaggaggccctgctcctgcccgaccgaaggcaacttctcccttgaagagaaaggtgcagacaggctccctctccccttccctcctcccacctcacccaattctgggcactttttcagcctgaaacttgcctgagcgagacaagagacactgcgggcccaacgtgtctgtgaggtccctttcccactggcccttcgtgttttcatgtttcagccaaacataaaagcgagacgtctcctgctcagctttcccaattctgcccagccctcgcgtccccctaagtctcatctgcagaaggctgagcctcatgcacctgcacctccttctcttggtgcctgcgcccaaatgtgtggctctgtctggctcaaccctctcctgggccccgtggctgagctggcctgttcttcagttccagctccattccctggccctcttagtcccgcactgcctggctggtcccccagccatctggttctgcactgcccagccatgccatcccctcggcccccgggtcctgtactgcccggccagtctccccgccctctggttctgcactgcccagccatgccatcccttcggcccccgggtcctgtactgcccggccggtctccccgccctctggttctgcactgcctggctggtcctccagcacctgcctgggttctcccacttccctgcagactccaggctgtgcccagagagagctgagctcggcggcccaggcgcctcaccactggccctcagtttcctcttcctccggtagtttccatgagagccccaaaggaactccccagcgaagctgcccctctgtccctggagccctggaacacaccacgctgtgcctctgagcgccgtccctggggccgtgtgccttccaccatcctccctctgggccctgagcctttgcagactgagcagggttctgcatctgactctggctgaccggaggccttgaggcaagtcacccaacctcccagaactgcttcctcagcttgcaacagagtggtcagaacggagggccccttgggcccccttccattcagtgaaaagctttctgtgggtcctcctgagccccaggacagcccgtgagtgaagctgccatctctgcatctgggagtgtccttgtctgctctccaccaccctgcagccacagactccttacctgtctctcggcagagcaggaagatgcagcaggaggatggggcttctctgttttgctctcacaacccacgcctggcaggcagcaggtgccaaaccagcatcagcgtggatccagcatgcagtggacgctgccctgccatcagctggagccacactttcacggtttaccctggcatctgccagagaaggaatggaccagtgggactccagagaggacagagggtgggggatgcaccctggggaggggaagggtgcgccccccacgccacagaaaagaacctgcaaagccctgagtcctggagccaaaggaggcagagtggcccaccaagggggatcggcagtggccaggttgcccagggctctggggacagctcgcccagggctctggggacagctccagggccgaggcaggcacccaaggtctttctgtctaaagcatcttactgactgctgtgtgacacctaatcaggaggagaaaatggagcggggagaccagcacacgaggggtgatggggctgggcccagggagatgagaagagggtgagggtgaagtcaggagccaccgtagtgccaccttggagccgtgtggcccccaggacctgctgtgggggaaggagtgacttccagcttcaccgcctggtgtagccactgtggctttgtcatgcagctagtacaactgaagagctgacttgtaaactttatccaattttagtgactctaaggaaccacatgtggctactgtatggaacaaggcggctctggagggctgctggccttcaaagtccggggaccttcaaagtccggggagccacaaaacacgattcgacaaagacgttctgctgtcaccacacacagcagatcaggaccatgtgctcccgcgtcaccacacacagcagatcaggaccacatgctcccgcgtcaccacacacagcagatcaggaccacgtgctcccgcgtcaccacacacagcagatcaggaccatgtgctcccgcatcaccacagacagcagatcaggaccacgtgctccacgtcaccacacgcagcagatcaggaccacgtgctcccatgtcaccacacgcagatcaggaccacgtgctcccgcatcaccacacaccacagatcaggaccacgtgctcccacatcaccacacagcagatcaggaccacgtgctcccgcttcaccacacacagcagatcaggaccacatgctcccacgtcaccacacacagcagatcaggaccacatgctcccgcatcaccacacaccacagatcaggaccacgtgctcccacgtcaccacacacagcagatcaggaccacgtgctcccacgtcaccacacacagcagatcaggaccacgtgctcccacgtcaccacacacagcagatcaggaccacgtgctcccatgtcaccacacacagcagagcaggaccacgtgctcccgcgtcaccacacacagcagatcaggaccacgtgctcccacgtcaccacacacagcagatcaggaccacgtgctcccgcatcaccacaccacatgcagcagatcaggaccacgtgctcccacgtcaccacacacagcagatcaggaccacgtggtcccgcatcaccacacacagcagatcaggaccacgtgctcccacgtcaccacacacagcagatcaggaccacgtgctcccacgtcaccacacacagcagatcaggaccacgtggtcccgcatcaccacacacagcagatcaggaccacgtgctcccacgtcaccacacacagcagatcaggaccacgtgctcccgcatcaccacaccacatgcagcagatcaggaccacgtgctcccacatcaccacacaccacagatcaggaccacgtgctcccgcatcaccacagacagcagatcaggaccacgtgctcccacatcaccacacaccacagatcaggaccacgtgctcccacatcaccacacacagcagatcaggaccacgtgctcccacatcaccacacacagcagatcaggaccacgtgctcccacgtcaccacatgccacagatcaagaccacgtgctcctgcatcaccacagacagcagatcaggaccatgtgctcccacatcaccacaccacacacagcagatcaggaccacatgctcccgcacacgctcgaggcagcaggctctctgctccatggcccctctcgcttcccacaggcaactttccatctactacttgggcctgcccttaaaagttaagagaatataggaggaaatctaagaacagatagcagaaggtctttgtgaccttggatttggccaatatatcttgggtatgatactaaaagcacaagaaaaaaaaatatatttttgagatggagtttctttcttgttgcccaggctggagcgcaatggtgcgatctcaggtcactgcaacctccgcctcccgggttcaagtgattctcctgcctcagcctcctgagtagcatctgccaccacacctggctaatgtttgtatttttagtagagactgggttttgccacgttggccaggctggtctcgaactcctgacctcaggtgatccacccgccttggcctcccaaagtgctgggattacaggtgtgagtcacaagaaaaatattttttaaaaagtaaactggacttcatcaaaattgaacacttttgtgtaacaaagacactatcaaaagagtaaaaaaccccgatgtaatgggagaaaatacttgcaaattacatagctgataagggagtagtattcagaatatataaagaactcttagaattcaacaacaaaaaatacaaacagcccacttcagaaatgggcaagggacttgaaatgtctgttttgctcaagttgatatacaaatggccaataagccattaaaagatgttcaacatcactagttgttagggagatgcatgctaaaaccacattgagatccactcacatccactgggatggctgtaatcaaacagccaagagataagagaattacggtcgatgtggcgattccgccccagggacatatccagggatgtgggtggacaccctcacatccacattcacagcaggattactcacaacagcccaaagccggaaacaacggcactgtccattaatacacaaatgaatccacaaagtgcggtccatccatgccatggaatatgagtcagtcataaaatggaagttagtgctgacacacaccacgacacaggccaacctcgaaggcattatgcaaagtgacatataacagtcacggaagcgcagacgcggtatcactccacttagatgaggtgcgtagtatattcagattcgcggaaacaaagaagaacggaagtgatccatccccgtaggcaaggagatgtgtatccacacacaaaatagtaccatgtccagtcgctgagtctgagagctgggtctatgcccgtgtggacaccccaccgtccactcacattcacgccgtgagactacttaggaacgtactcctagccagctgaagtttaaaaggtcgctccagcatgggctcacaagccgtggggattcatattggaacacaaaattcccggtctgtggctcctgccagacaaaagaaatgagtcaccccagactcactctgcaccttgtcaacagccacagctgctgggggatcatacagtgtctgcttggcatggcctccatggtacctggggccacacaggcaccctcttccggcccaggcgcagaccctggtgggaatgccgtggaagtttggccacacttctcagccactgcatttctgtgctggcccctggggagtgaagcctgaccccacccagcatgctcagcccacctcatctctggggagtaccccctcagtgctggttgctcctcatccctttaaaaaattgtggggaagtagaaaaataccctcagtaagtgaagtcactgacaaaaaagtaaaaggcacaaccttggaaaatatcttgcttgaaaaaaacatgttttgctacatgtgagccaagcccttcaatgagagaggaacaggctacctaaaaacagattcctacacaatcgtctattatcggtgagttagaaacgcatctgctgccacagaaatgacacgtgtaagcgcttcccagattggtgcctactttcctgccacaaaacccattgcagaacatgagcctgttgactttcattccaaactgcatcatcgtctacttgctgctaaactggacagtagagaaagaacttcaactattctgagtttgtttttaaaggcccttcaactaggcccaaaggccttaatccctgatgggctgtgtggacaagtgctgctctgctgtctgcggccgcagctgctggagctaaaagcatgcagaggccctgcatgcaggactggagggccctaacatcagcgttggcactgcccgactgcccgggaagcttgggaagggcattctctggtcttctgtaatgcattcctttacagaaagggaaatgggaagaaaggtttcacgtccaggactctgggcctttgatcatttgagaaacgctgggtctgcagtgggggcctccagcttctcaggccagacaaagacgccccgccacacgggcagggcccagcctgcaccagaacaaaaccccagcgcctctcagtgtggaggcctgggaaaggcccacctcagccggcagaggggctgcctgccctttgatctctcctgagactgtggcctgggacccgggtcagggaatttcacaccgcacacaccccagggaaagaggagcaggtcaagaacaggaggagggtcaccaatctcagaaaaggccccaggccagccctctttggccatttccacatggctgcatgcgtattgtccaaagctgagcccactctcaaaggagaattgacatcacatgccacaatggagccagtgaacagcagctcaggtgcctggacaatatgccagccctgccccccgtaccggggtctcgaacccaggacatacttctccatgtttccttctctgtggagtgaacctgagccactcagaacccaggctccatcccatccctgtggagacgcacgctggggtcacctgcgtccggccgcctgcctgtgcttctggtccctggatgggcaggttccattggaatcacaggtgcccccagcaactcaccacatcacacgttcacaaacataggcttggtcagaaacacttacatcaaatgatctgtaacgttctgaagacattttggtttaagagaagaaaaatctttgtctgagagagggaaagaagggagggcccatgataagtggagaaatacaaattccatggatggctctgagctccaatagctgtaaatttggaaaggaaaagaaatatttgacaagacacagcagcattaatggacaaggaaaaatggacttttaaatgacaaaaagttaggattgtgtcatgtccaaaacaaacaaaaaaaggattaaaaatattatgagtgtttgcattttgtttttgtttgcacattcccaccactaaactaatcttgggtgtttaaaatgacatttggtggcacaaaaactgatttcatttctccccagcagccagcaaaggatgctggcggtgttgggtaggtgtggggtgtggggctgggctgcagccctcccctctgctgcaggacgctggagaacttgcccaggctctccagtccttctgcgtaaagccatggctgttgttttatcttcacatatttatgtctttttttttttaaccagaagaaaatgaagtaaggaaaatgcttattttaaaattgctggcattcgtggaagtgtatagaaacttgtttctataatcaatggctgctcctgtcactgggccagtgatggagaatgggatgttacggaaggcggaggtctctgtatgaacacatatacgtgtgtgtgtgttgagacaaagggaattgtttattcacagctgggaaagagaccgtaggatgctaccacctcggtgcctcccaccttccatgggacgctaacgggtatcgcaaggctaatgcagactcttctcaagtaagtgtcggaggcgccaactgaagggaagctggacacatctctctgccctggactccttgggacctctccatgcacacctgccctgtgatgcccaaggagcagactcagtgtgtgcctcctctcaagctcacctgcctggggagccttctctctggcccctatttaaagagatgaccttagaggttgggtattctggagaccaccttttgagaaatgccagagctcaatccccatgcttttgtaggagaaaattggatcccagagaggttaaaagctctgtccaaagtgataaacctcattgctggcagagccagacccgcgcacagatctgcttttccacgctgctgctggacccatcctcgcaccctgcgcctcatgtctaagactccccacgccgtctgcgcatgctgccgctctgccaaacctgtccttctcccaccacaggcctcaagtctaagactccccacaccgtctctgagaggaacgcctcccacagcacgcacagagattccctagataagaaggacattcacaaagagggctgaaaggctcatttgagagggggtgattgacatttgatggcaattactaacggatatttttagtgtgcctctagtgtgaataccgttttgacaacagtggagttacaccaaatactggagcggcattctgcactgcaacaacactgaaggacccgagggtggcttctccgtggctctgaggttaacgctgcagcgtatgcagcaaacacctgtcaaggacccactgtgtgctcggcacaccaaggcaggtaacaaaggacccagtgcatgctcggcacgcagaggcaggtaacaaaggacccactgcaggctcggcacgcagaggcaggtaacaaacgaccagcctcagaagcagatgtgcttgctgcaaaccaccttcctacggcccagcagaggcacaacaagcagcgaattttttccagggcctcccgtgaacacggcaccctacgttgccatagcgacgccatcccagctctgagccgcaacaaagcggcagtgtctgtgtctcacctttggccatcttgttgagaaccatgtcgatcaggacgtaggtgccgctccggcctgcaccgtcactgccaacagaaggagagaaatgaaagtgctgccgtccacacggaagcccgacccacaacaaagctagtgacagttcatttccttcctgcttacgggggccggcgagaggaaaggatggcggatgtgagagggggaggaaggacgcgggctgggagaatccaagtgaggggagaagggaggcccctgggggcttcgagcctctgagcagcttgtagcttgtgggatgagctgctgtgctcagatgtgactccctcttgcttgttcccccctctttggccaaagatgtggtaaattttgccagaacaaaatgaactaagcgtttgactgtgtcagagttgatggcatttgtattgaaaatatctgcaaggtgccttctctagtgttgccgggcaacctcccgagcggagaggggagggcgctgggcggctgggccccgctggctcatgcacgcagggacacttcaggcacatccccctaggctgcctgccaccccttctaaacgcaggtcctccgtctcagaaggagaaattgacataacagtcgttactaaatcttactctttaaaaagcactctcatttcatctctttctcatcccaccagctataattggaatatttaccatctgggctagagttgtaaaaatgttttgaataatacttcaacagtagcaaaggaaaaaaaatttccctttttttctggaagaagagtagcctcaggatcatccttttcttatgaggaatgtgtgaagccatttcctgcccccgtgcagacgctgtcactgggttgcatgagtttgagagaccttcttaaaagtacatagggctcgtgttcacacccatgactggcttttaaacagaggaccttttacatttataatcctagcaaaatcaattgtgactttccggaaaacgaataaatgtttccatttcaagacttcaagaaagatgtgactacccagcagatatcacactttcggttctgctttctatgccgtctgtgatcccaagaaatgactggaatcctataggtgatcttttgatggtaaagaatcagcgcattttggctttaacatgtttcctcaaacaaatggttgaaaaaagctgcagttgggatggtaaatgtttaaaaaacggcacgttcacatcctcacaccctcactgcatcaccaaggaggagaggcggtcggcctgggccgccacgtaaccctcactgctcatttcaaagggccacggtgagcattctggttgctgagtgcctttctcacttgtctcctatgcacagcatatattcacatgaatattttaagatatacttcaaaaatcttccaactaagtgttgcttgtcttgatacatttgtgggtaaaaaagatgttctactctactctgtaaggataacaaaccgtaatctattttcatcctcctctctcatagacaggaatgcacacacaaaacacacatgcttcttgattggatttgacagatttggtgtttgttctttggagacaggtttcctttttattccaggcaggaagaacattctataagacagttctagaaaaatggaatatgagttcttcaccaaaaggagttgggtatgaagtccagcagagacagtactattaggttgagttttctttgcgtaaaatctattcttactggtgtggttttaacgtacttagggatatgagtcactgaatttttacccagaggcctgaacccacatgataaactggaggtggctgtacctcctgtaatgacagatttcgtccctgtacataactggccccaagcatttctcaccatctgcagagggttctgagcctctgctggacgtcctggtggttgagacaatgcaacaggctgaaaccattgtctcgatgtttctgtgtcatgggaccacagggtttaagaacaagcaaggtggcaggacatgctcacgggtgagtagaaggcaggacactgcaccgtgggctgctagaaaatattccatgtgaggcctcgcgcggtggctcacgcctgtaatcccagcacgttgggaggccgaggtcggtggatcatttgaggtcaggagttcaagaccagcctgaccaaatggtgaaacctcgtctctactaaaaatacaaaaaaaattagccgggcgtggtggcgggcgcaatcgcttgatcccgggaggtggaggttgcagtgagcctgacgagaccacgccattgcactgcagcgtgggcaacagagttaaaaaaaaaaaaaaaaaaaagcaagccatgtgcagtttatacagacataatacaagcaacgcccaattgtatttacccaaatggcatagaaaagtaagtttatatttttggtttcctttagaagtgccagttagttatatttattaagcaattagaaagttaagcttctgtatttaattgcatagattagtttttgaggtagccaaaacttcttaatccattaaaagttgtacttgcctgcaatgaacaattattggacaagaacggcccctgtagcacttgtttacttttctgaaataaaaagagatataaaaattatcgttgtgtactaagactttgcgttatccaaaacaactattaaaacaaagcgcaaggtctgtgtgtttgaaatcattttgcaatcgcttgttttgacggagaaaataaaaatcatacgcataatatcaaacatttattcttcttctcaacatgacgttattaatcggagctttaaaaccaatgttacacctctacactgctttcttcttccaaggaggggtgccaggctttgaaccagtggactcccggcctgtcctgcccgtcccacccctgcaggctctcctctttctgtttctgcttatgttgacttgaccttttgttacactacatcttgattcttcactaaaatttttgagttttgcaatttatgctcaaaatttcttagtccagacatcatattgaaaactgttatttccatactgtctaaaaacagcatcttcaagggcatttgtgacccgtcagcttttggtaaggatatctaaattacggagaaacctctatgaagtccaagacaagtcccttccatgcttataactttgagtatacaaacaacttcattgtgcagagtttagatcagaagttgtaaaaattagaaatgagcatatatttaagatttcataaccaacccctaaatcaaaacagaggactgatttaaaattcactgtgtaaatccaggtgtttttttttaattcagtgaaacaatgaaacatgtttatgaagtccattaaagttgtcagtgaactatttctgaataagtaaaattaaaggcggaacctcgggttattggaataaagcatgtgtgaaggagagtgttctacaatgtgctgcgtgaactcctacaagaaacaaattaagaaaaatggaagtatggaccatcaatgggaaaatgtcacgtttctttgcaaagccttgcctatccagcaccaaagagtccgtggaaagtaaacattccatcaaccggtgctttgctacaaacctttgaagccaggaggggcagggtggctgtggaaggagaggggaggtgagtgtccagtgagcatgaggggagggatgcttgaatacggcggagcccaaaccacagagctttctcctcctctcttcctattccctgaggagttaccagaacaaggcccttctgatgggagtgtgaatgcccagtctggagggcaccacgggagctgaaggagcagttgcagggactggactcggcgtgcccacctgcagatgggccgcggccacagcctagccaggacgcacttgatctgtgctgccctctggtctgtgaaacacgaggctgatgcccaaaaatgggcgggctcagacacaggcacaaccagcaacggcctccagggccgtgtcaccgtttctgttagaggtgtttgttgttgtttttccggggcacacagtggtgcgaaggctttggggagaggcggggaaggcaatggtgaactccttagaggcaacagcacttgtatgccagagtgccttgaacattcttggtccctggagaataaagaggttggaaaacagacccacttatgtctacttctacaattttccattcctgactcaggctgtaaagcatcgagggctcctgatgacagaatggataccaggcctcaggggtgcaccccagcatgggggtgggaagccctccagctcagtaaagaccatgtgtgtgtgcatgagactgcacgcatgtgtgtgacgtgagcacgtatgtgcacacgtgtgcacgtgtagaatcaagcaggctcaactatcagaccaaatggtgagtggctttgctttgaaaggccttttgcctttggcagaggagtttactggccatggctcagcctctgaatcttgcaaatgggaatgacctcagttctgctcctccagcttcctgctgtgtttcacacctcgtggtccactctacgcagagactaagctcagcttctgggtccacacccaccagtcaccaggggttgctcattttttcctcatgagaccaagtacacccaaaaaagggacagtaaaacaaaccaaaccccaaaccccaaaccagataccctttaagaaagtgtgctggtttgaggaaaggccagcataagaagtcagtagacagcggtggctcatggatagctggtcagctcctgctttggcaaaatgcagtaataacccccttggctgggaaatgctcctagccagtgaatttgtggctacgatggcctcaacctgcttccccactcccgaaactcctgtctctatctcacagtatacggaagataccattttctctgacatgttgtgcctggtggccttgggaaggtttcgctgtaattttcatatccgtaccagcccccaccttgtgctcaacctatttacaaaaacccacgggcagtcaaggacatgtgcagtgtagatacagggtgtggcatggctgaggactttatttacaaaggatcatgcagttgtattattacacgcaaagcatcacaaatagagaggaaaaccacgacatattgaacacaagagttcatccggttgacccaagatgtagaccacgagttattcaggaaggtgacacagccgtctcatttgactccatcagaacaaagaatcagtgagcaaaaggtctccaacagtaagaaaagttggtatcatagaaacttccacaacaggaattcactgagaaagaacgattagtgatacaaaccaacccaggggtcaccgggcgagagcgcaccgtcatgcaaagcaccagcaagcaaggtcagaggtcgttagaggctcagaaaaggggctttccacatcgcccctgcagtacagtcacagtttccaatgatcacttttgtgactatgcaactgggctcatattactagctgcaacatcacaaaaatgacactggccaccgctaattagctggcaaggtaagggtttgtccgttttaccgtgagcagcgttagtgagcaccattgcacacagcaagaagggagagagtaataatgagagagagagagagagagagagtttttaaagcaaagccctcacatgtgatgctaattatctcttagcagtttctctttaaagtgtaaatgcgctccctctgggctccagaaatatttaatcacacatctcggtgcctggcgaacgcgccaggccagagtgagaacgcgtcgtctattgttcaaagataagaaacgctgcagcatgaagatggccggtgtcttcagaaggggtctcacctttcctgtcgctgaaatcggggtggctattttatacagaaaaccagccaccggcaatgcttgtctaagtgtgaagctttctgagaatgtgttcgctcaaacccactgtccagataacacatgaaaggtggccttggccgaaacgctgggcggtgccaggtaaggcaggcaagaaaagctttctactctgacgtggctttcaaaaccgtgtctgggggttcattagcttttgaatttaacaaaaaccttcttaggctgtatctcctcagaccctggagcaagggaaatttgggaatccaatttttcttggtgatgaatcataaacactgagggtcggtgatgtacatgttcccgtccatatatggatatggacatagcaacgtgcccatatgcatatacgtgcaaacacactggatgaacgcaaagacggggtgttaagatgaattgccgtctttgtagttacatccattttgccaggaatgactgttttttgaagactctatttcaggaaattatgtaagatttctacatagtatgtctttagaaataaatccgtattgacagaatgtacataatggccaggaaattagcgtgggtgaggaaggagccgtgtacagtagttgttttaggatgtactcaggactctggatctacgctctgcgtccccaggggaggtgacggcaggcaggggccactgagtgtgtgttgtggctgtgacaccagattcaagtgtctccttgcagaggctcttgattgatttctattgattcaaattacaaaaaactgcattttgcttttcaatgtagactaaaaggcaaaataaattgaatcataataagcttcagaatctgtaatacacaaattcaagaattccacagagaattcaaaaatcgcttctttatgacaatctttgtctcgttaacctccctccagttacataactgtagactcgagaatgagtaactgttaagaatcaagtcactttatgatagtggggcatggcattggattcaaatgcattttttcttcttattctccttgtttggatatttgtctcttttcctcaataggtagacttctgatcagttaaatgtaagacatattctatacaatttagagcttcgtcactgatgcttttgacaatttcattttccttgtggtggtttattcactaagcaccaccacctagccaatgcggaccgactgtttaccacaatcaaagctgtggtcttaaatgctgcttttttttcattgtcaatttcttcctgtaagacagagtctagcattcacttcaacagttcagtaaatacactctcaaaccagacaacgtattgggtgactggctgactggagcaatgaacaaaaaactgaattttttaaagagggtcagtttcaaaatagccctaaaaatacagacagccacgggctaagtgtctccgggcttccctgcaagatcacgcagggtggtatctgggcctgcgctcgctacctctttcatcccatgcagccagatgagaatccaactgaacatccgagctttatgcatcaatatcctgtggcacatacactttaggctctttgtcaactgaagaaccttatcaaaaataatggccctatttccacagttcgaagatgcctattccccctcacattttaatacctctgaagctagaaaatcgctcacgattaacacgtgccgttaacggagtcttcccgcctctcgcttcccttcccctcccccctgcggcgccgacacagacgcggccctcggcgccaggggcgtctcaggagcaccgaagcctcgctcccctgtgccgcgcgctcagcgcgcactgccctgccggcgggccgcgcgtcatacctgcggaagtccaggagggaccttgaggaggaagggactcctcggtcataccaactcaggaagtggaactgcgtcacggtgcgcgtctcgttggtctgcaggttcttcagatagaagctcctcaccaggaagtcctcacaccagatgtgctcggagaccaggttcacctggcagggaggagcggagggaggggacagagacaggtgtggacattgtgaaccgaacctcaggcactgaggaacccagggccacgtctgaccagagaagggggcgctgcgaagagggcacattttacagcgcaggtgggttccctcggcttcgcggccccctcccaccttcccagtgttaacgcactgaagttagctccgtgcgggtgtgtgtgcttagtgttatttaggggcttgagcgtcaaataattttttaaaaggttacaatccaaaactatcctactttctgtcttttgcatgtccatgttacataaaccctcaaaaaaaggaaccagagaaaaattacacttttcaacaaaagcagcgacacgactacatgttctgctcagtggttccactctaagtgagactccgtcgcagctgcgcacacccgggtctagagcaggaaaagcaaaaggctcacggagtcgcgctgatgtgaaccccagcgcaggcacttccgggcctaagcgtttctgcaggaaccccaaggccacagctgtgtggtttaaggttcacacttgagcctctaactcgcttcctgctgtggagctttggcattctcactcatttaatgccaaacagaatcaaagcatgcattctagtgctggcttaatcacccacgtttatttagttcattcttgatgggggcagaaaatccagccagataaataaactggtgagcaggttatcctcaaataaaaaggtcacatgatccagccacgaaactccaagcagagccacggggaggccacacggctcaggcactggcatcaaggatgggcgccaggttttcttaaaaacggaccccacttaaaggcttgttatatgggaccgggaccacgctgtgaggcgaatgttttttctactctgttatcatttggatttagaaaaatctaaaagataaaaaccacaccacactcccagggtctggttcatgagcacacagccgtgtgaaccatccacacgggcatgcggccctcgggggtgactcagcctccgtcccctgaacatggggtgcgctgagcctccctgcatgcggccctcgggggtggctcagcctccatcccctgaacatggggtgcgctgagcctccctgcatgcggccctggggggccctaacgaatcccattcggaggaggagcagggcccgtcctcgtccggctggtgggtcctgccctgggtggctctggtcggagtacctcatagatgtggtagagattggagccttcatccggccagtagtggtagcactgccggacgccgttctccgcgaggggtgtcagcatgacgatcaccacgcagccgctctcccacaccatctgcggacaaagaaggcccgtggccgcggtgtgactgtctcatcaccgcgtgacatgtgtaattactgcactcggaagcacagtccaaatttattccattcacaggacatttatttcattttcatcagacatgtttactccgcagctgcctgagcatctctgaatgcactggcccatagtttgcatgttccacgaaatattaaaaaaccccgcaaatttatcccatgccatttagagcttcctcaggtgtaggttcagctgtgtggttttccaacttctgatctgtaaaggaaactttctacaacgccacacataacagccagcacttctcgaggcggtgccgacaccctcacttgctggtggctagcatcattttgctcacctagagaaacgttttgcttcgtgaagctgctgtcctgtcagaagcagcctccgaaaggcttcttttcaaagtacttcacggaaagcagtactgcactgctgcaatttcatttgtttataccgaaatatggcaacactattcagattaaagcaaataccaaattgatttactaattcctattagccacattgaaacacaataaacaaaagcacatttaaacccacagaaattacaaagacacaaagtcctctgacctcgtttctttgcaaacacaactggctacttgtggctgtaaacccacatcttaacatttacagcctaactacccaaaaccactaatcctgtggggcacactgatgtggcatttgtagatttttattagcatatgaaattatagagtgaagaggggtctgctttttctgcaatgggttacattaacttggcagaaatgtttataagcaactgcatttagatgtaaatttggtatccaagacagtttctatttcttttaaaaacagacacaaaatccaattaagaccttgttattttaaaaaccctcatatcccaaatataaaatgctgtcatcgtagcgcatgttactgaattccacatttatattttaaaaatcagacacaaacacgacattttccttttttaatattgatttatgttctcacggggctgaaatagtcaatatcctcaaggcacctcactgtgtaacatttacatcggaagccaatggaaccaactgaagtatttacaaaacgcccacaaataaataagaattatgctcaaatttgtgcactttctctttccttagtgcccatccgacaacaagatgagaattcaaaacatgtttcttacgccaggcttttcaggctttcaaacctgctcctccaaatcggttcttccatcacataacaatttaatgtgccttcagaaggtggagaagctcatggaagccattacgaaaatgaggagaaacacagattttatgagtgtaataaaaatacaatgatctagaccataaactaatcatccggcactcggctccgtgccacccaagtgtgacattacagagccccgtcgactggggggacccggacggcctggaagccgcactcattggctctcgcgtccgcccttcattatggggcgccttcccggctctctgaagatttggttaagattaaatccaaatgaaacttaatttaaacaagcaatcccaaaggcgctctggggaataatatttctttttaggtcactgtgtataaaagcagagaggggaatttactaaatcaaacaaataggcagcccaattgggtaccaatattacaagctgttcatggaactgattacattatcttgtgttcctttgaatcggtacaaagcaactcaatcgaggaggaaaactatggcatttctccatctgtttccagccttcaacagcgcgcctgaccagataacctcagaatacatcgcaaaaagttaatttggattttggtatgaatgcagaatcagtaaaaatcccagtcgagtaaggttcaatttctaatcggggagaagtttcactattttctttctcattgacttggtctttgctgacaggtgaaatacggaagtgctaacccctggcacctgtgaatgtgacctcatttggatacaggatttttcagacttaatcaagttaacattggtttgtgtcacaaatctttgagaaatctaaaactgtctctttcaggaagtaaataatgacccaggatccttatttaatcttaatgcagttcattggaatgcgcagtttacaaaactgtatgcctgaattccagaaatgaccattactggcacttcctgtttggtgaagggtaagagaacacggcccccatggccacctgcacagccgagtacctgcacaccccagcacctgcacaccccagcacctgcacaccgcagcacctgcacaccacagcacctgcacaccgtggcacctgcacaccccagcacctgcacacccgagccgagcccctgcacatctgagcacctgcacatccgagcccctgcacaccccagcacctgcacaccccagcccctgcacaccccagcccctgcacaccccagcacctgcacacccgagcccctgaacacccgagcccctgcacaccccagcacctggacacccgagcccctccacactccagcacctggacacaccagcacctgcacaccccagcacctgcacaccccagcacctgcacacccgagcccctgcacaccccagcacctgcacaccccagcacctgcacaccccagcacctgcacacccgagcccctgcacaccccagcccctgcacaccccagcacctgcacaccccagcacctccacaccgtggcacctgcacacccgagcccctgcacaccccagcccctgcacaccccagcacctgcacaccgcagcccctgcacaccccagcacctgcacacccgagcccctgcacaccccagcacctgcacaccccagcacctgcacaccccctgcacaccccagcacctgcacacccgagcccctgcacactccagcacctgcacacccgagcacctggacacaccagcacctgcacacaccagcacctgcacacctgagcccctgcacatcccagcacttgcaccaccatccctggatcgaaccaaagtcaccaacatggactgaaaatgagccgcaagtgctggatcccgagtgtgaacggctggcaccacgctttggaggaaaactgatactccccagttttacatacttcttctccagtgcagcgtccccaggcctcagcatcccccttgaaggctctagctgtgccagctctgtgggcctggggtggggaggggagcaatgttgcgctttgctgtttatgattccagaaggaatggaagtggtcagcccagtggttctcagagaccaccaaacacaggggttaaagcctgctgccaggctctgtgaacctgagccatctcgacgcgcccggcagggacacagcagcttgctgtgaggtctcctgacagctgttcagcagcagcaagtggagaaattcagtgattcggacagtgacccaaggaacaagaagtgcagacttcggctgttatttgacccaactgagtaagtttactgactgtagatttaaaaaccatattgttgtttgttacaggttcaacgctgtcctccccacagcttatattgacgtcctaatccctggtatctatgaatgtggccttatttggaaacaggatctttgcagatgcaactgagctgagggtgggtcccaatccaacgtgactgtgtctttagaagaagagggagacacctcgagaaggcacagacacggagagcggccacgcgcagacaggcagagatggagtgttgtggccacccacgccacacccctcatggcaggcggccacgggacactgcagaggccgtgaggatcttcccccacaggcttcggagagcgtggccctgctcacacctggatctcagactaccaggctccagaactgcgaggggatgccctcctgttgttttaaaacaacgagtttgcagcaccttgtgatgtcagccctagcaagagatgcatccgctgcaacctcactctcttcttcacccatcaaatcacccacaggcgtggaacaatggccaccccgcctacgcttcctatcaacaccgatggagaggaacacagggcctcttcactctaggtcctttttgagtgctaagtatttaattagcaaacaaacaaaaaaacaaatgacccaactaaaaatgggcaagggatctgagcacacatttctccaaagaagacagacaaatggcccgcacgtatgtgaaaaggggctgaatgtcatcagccatcagggaaatgcaaatcaaaaccacagcgcactggcacctcgtgcctgttgggatggctgccaccgaaaagagggggatggcaagtgttggagaggatgtggaagagacggaaccttacacactatacggtagcaatgtgagtgagggcagcctttacagaaaacagtatggagggccaggcacggtggctcacacctgtaatcccagcactttgggaggccgaggcaggtggatcacgaggtcaggagttcgagaccagcctgaccaacatggtgaaacaccatctctactaaaaatacaaaaattagccgggtatcgtggcatgcacctgtaatcccagctactcaggaggctgaggcaggagaacctcttgaacctaggaggcggaggttgcagtgagccgagaccgtgtcattgcactccagcctgggtaacaagagcaaaactccacctcaaaaaaaaaaaacaaaacaaaaaaaacaataaaaccagtatggagagcctcaaacaattacacagaaccactgtgtgatccagcaatcccacttctgggtatagacccaaaggaaataaaatcagtgtgtggaagggacatcagcacccctttgtttattgcagaactattcacaataaacaagatttggaacaacccacatgtctgtcaatggataatggctaaagaaaatgtggtatatacacaatgaaatattattcagccttaagaaagaatgaactcctgtcatttttgacaacatggatgaacctggaggacacgacgttaaattgaaataagccggacacagaaggacaggcaccccatgatctcactcacatgtggcacctaaaaaggacgaactcagggacagagtagaaggggggctgccagggcctggggctgagggtggaatggggagcaattgatccaaaggtagtaacttccagtagaggacagctgaattctggagacctggcattcagcatggtgactgtagttaataagagtgttgggcacagagatttgccaggagagtaggcttcaggtgcttcaccacacacaaagaaacggtaactacgcgaggagacgtgtattcattagcttgactgtggtcatcattcacgatgtctgcgtgtgtcagaacatcaggctgtacaccttaaacatttacaattaaaaacaactcgaccgggcacaggggctcgcacctctaatcccagcactttgggaggccaaggcaggcgaatcacttgaggtcaggagttcgagactagcctcgccaacatggcaaaaccctgtctttactaaaaatagaaaattagccaggtgtgttggtgggtgctgtaatcccagctactcaggaggctgaggcaggagaactgcttgtgcctggaaggcagaggttgcagtgagctgagatcatgccactgcacgccagcctgggtgacagagcgagactctgtctcaaacacacacacacacacacacacacacacacacacacacacacacacacacactcttaaaataagctctcctgaagccccacagagacctgatttaagggaagatgatcaatctgaaatagtgaaacactggagctggatgtggtggtgtgaacctgtagtcccagctagttgggaggctgaggtgggtgggaggatcatttgagcccaggagttcaggaccagcctgggcaacatagtgagatcccatctctgaaaaacaaaacaaaaaactgaaatagtgaaacgccaggccattttctctacaaaacatccctgggccccttcaggaggaaagcttctcctccttctacttagatcttttgtgatgagtcccttcctgcctgtgttagtcttgtctttagcccgtatgtctttcctctaccagactatcatctctttaaagactccatcctagtccagttaccttttctaccctccatggcatctaacagatgcttcattgaaaacaattcacatttctaagaggccgtttggatatttatgtaaaaaaaaagataaccgaaagaaaatgttatcaaaggcttgcatggcagaagtcctccaggacttgcttaaatgtacagacaagtgttcagtttttaaaaaaacaagcatggtaactgcatcccgctgaagcggttgccatgaagatgcatttcctccagagcaggtgcggggcccacgcaattctgctgcacagctcatttctgctcatttctgttgtgagcgtcctctcgtgggctgaacagaggtttagacttataaagaagatgcagctaaatttaaaaggatgaggagtcagttaatgggaaaacactcgtatttcactccttaggagctcaccgatgcctggaagttaaactgtgtggtctgagacagattaaagaggaagaaatagtgtgtgtgacatcttttgcaggggaaaccttcagctctgctctcaccctgcccagaggacagtcctaagaaatgaagcttcaggctttgcggctctggttccgagagagtcacaggctccaggccacagcacgcacatttggacacggtaatataacccaacgcagggtgacaaaaccttcgtgatgccgtccatgaccagctcatggtgcacctacctggcttttttttagtaaacaaatatctcagtgtgggattcatttagggatgacacgatgaggtgacgtagcccacacacacgtcagcagtgctgatggaaaggctgatgagggggcagcgggaggaacccccctgtgccgctatcagatcgacgcctgtgctgccttgtagccccatcccagggctgaggagcagctgcagcaacctctgggacttttccaccagcagtattgccgcccaggaggaaggggaagcctcagaacaccagcagtattgctgcccaggaggaaggggaagcctcagaatgaggacttgccactccaccaaagtcgggtctgtgttctccgggaaggactcagcctgcttgtgtgcaagcagaccccgtgtggcttggtgtggccatcctgccgcataggggttcccacggtgggaatgcactcacacactggacttcctctccacccggcctttgtgtgaccaccgtgggtgcctttgtgatcaggcattggacccgcacaggaagtcacctggcacaggcgtcactgagactccctgtggcctctgcctgtgctcacgttcccggttaaatatgcgcctggtctccttgcggggagctgctgcactgggcggcctttccttttcaagatcaggacctgacataaatgcatcagatccagttgtgaagcaagagaggaagaggaagaggaagaggggaggaggagtggggatgggaggagctggccggaggctgggaaccaatcacacacaggagcagcagagcctgctgttctcagctggagcagtaagaatcagtcagaaaggaaagccggacctgtcctttctacttgagtcccattttaaattccgcatgtgtgcggcgagagactgaccgaccatctttgcactgtcccaggcagaaccatggacaagctttgaggtcataggtttcaaacccaaaatttagataaggcaacgtgagaaacagtttctttcacctttaaaggttcgtgaatttatgaatagaaaaaaatccagcaagaccaaacctttgaaatataacaatgtcctggaaagtctcaggcatgtggttaaagtacttatcaatcatggaaatgaaaaatcaagtttttcctaagaaattaagaatgaacacaactctcatgttaattcctaagaattaacacaactctcatgcttccctttaatcaagtaacgtgccttaaaatcaacccatctgtgacgtagcagcctctgaagtcatttccccccgctaacctcctgactctcccttcactccagagtcagtgagatccacagacggttccctctcgcaccagtcactgtccagggggtggaacaggatgatgagcaagctgagtcttcacccacactagggagctgcagggactgggggacattctcatgcttttggagccagaccacttaaggtaaccaaggacccagagcagacaccgtggtcccaggctggacacatctgacgagaaaggagaggctgccagacaccgggtctgtcctggagactcagggcccctgctgctggatgctgggtatgtcctggagactcagggcccccgctgctggacgccacgtctgtcctggagactcagggccccctgctactggacactgggcctgtcctggagactcaggggccccgctgctggatgctgggtctgtcctggatgctcagggtccccgctgttggacactcggtctgtccgggacactcagggccctgcctcccacatgccgagggaacattaaaacagttgtgagtagctgggggccgtgaaccagctcgggctgagcggatgccatctttggaggatttaaatgtttttaaaaattaggtggtgtaggaccatcccctccaccggggccaggccagggtcatctctggatgctctgaggtttggttgctggtggtgctgatggtgatgcctgcagtggtcatcctgggctgatcaaggaagctgcccagagacagtgcatggtgtggaatccaggcctgccatcttcccacccacccctgcctggactagtgcagtagctgacacagcagacaggcagatacacaggcaggcagacaggcagacaggcaggcagacagacaagacaggcagatagagacaagacaggcaggcagacagagacaagacacacaggcagacaggcagacagcgagacaggcagacagacaggcagacaaacaggcagacaggcagacgagccactggtgccgggtggtgggcggccctgcacggtgacagtcagctgtcaactgtcattctcctgcacctcggccttgtcaccggtggctggcaggcagttggaaggaaacaccgttaaattctttgggtcttccacagttccaagttcaggattttttcttaaccatagtaagaactatgatctacagatgccaaataataaaaagctgtatttacatcaagcctatcaatttggaaatgagaaaacatatccccccagctgaggcttcatcacagaatacttttagaaagcagaaactagaaattgaaagtgcacctttttcttggtaaaatgttgatgtgcaataagagtcaacacacatccgatgccagtgggacacctgctgacttcagcgagcgctttgtgctctctctgggggccaggagagctgtttcgtgtctgactctgtcctgaaaggcagcctgttcatcagacaggagaggcaaggctgaactttggagttgtcctcttggctgagcctcccatacagggagccagttcccacggtggctgtccccatgcctgggctcccgtggtggctctccccatgcctgggttcccaaggtggctgtccccgtgcctgggctcccgcggtggctgtccccgtgcctgggctcccgcggtggctgtccccgtgcctgggctcccgcggtggctgtccccgtgcctgggctcccgcggtggctgtccccgtgcctgggctcccgtggtggctgtccctgtgcctgggctccagggccctggctttccatgtcacatctgcagacatccactccgcacctgatggtgacagactatgctgcctacatttctggtttagaaacagctgttgtgtatctcctgggcacagccagtgtttggtggtgacacacagaagctctctctggaagaagagcacataattctgcagctctttctaaaaataggaaaggggggatggcgggtggccaactcccttcggttgactcgagccgcgtagcacagggtgtggtagaaggtggcgcagcaggtgcaggcagtagggaggtggtccgtgatggaatatcgatgcccgcggcccctcccctgcctccccggcagtcctaatcttacagctacagtcctgcccgcaggggcttctctgtgatccagctacagtcctgcctgcgggggcttctctgcgacagctgccctgtgcaccaggacatgactgggctggggacgcactgtggggccacgtccccgggaaggtgcagaccttgcttccccgtggggaagtctcggcacctggagaaagcgtcactttatctcctgtctctgaggactttgactttcacatattctgcgccttgagactctgcacacgtgtatttttgtaaacaacacctactctggaaatgccgaggtcactgctgccggatctctcttttctgtttatagagacgtcttcatgtcactgtgccttctttatctgtgaggagtgtgtatgctgaagagacaccctggcactacacatgtctgggtctagaatgggctttgcctcccaccagctgtgtggatctgggtgggtccttatggctctctgggccacagcttcatcctgggtagaattgggctcactctgtatatctctattttaattgtagtaaaagatacctaacatataatttaccgtttgtaagtgcacagtgcagcggcagtaagggccttcccaccgttctacaaccgtcaccgtcaccacgctcttcagagcattctcatcttcccaaatggaagccctgtcaccatcaagcccctctgcactgtcccctccctgagcccctggctactaccccctagattcatactaggcttctatgaatctgacgcctccggggaccccatgaggtggaatgatgggaggctcacgatggcttcatcgcagggtcaatggctcggccaaatgagatcccatatgggaagtgcctgcccagggcctggcattgaagagctcagtaaatgggacttcctttcttcccccagccccctttccttatgcccactggactcgaatgtcccctccaatgggtgcgtgtctttcactcaaggtggccccatttggcaggtgggaggcgtctttgcagattaaaatacactttctagagaaaggctttctagagaaaggctatctgacaggtacccaaagccgcagggatccaggagtggaccatggagacctgcctcctcctctcgtcttccttcctgatattcagcctcctccctaagcggcttgttgacagcaaccagagctcaacgcctgggggtgtcaacggatgggtatgaggtgttaagactccttatttagaagcattgaacaaaacagtaaaacctcacagccaaactcgtgttcctaatttaaaatttattagaatattcttaacccttcttcagatttaaattaggattttaaaaagaaagtttaggatttaaaaagaaaattaggattttaaaaagaaagttttacgcaccaccaagtccagacgccagccgaggccaagtttccttgtgacgtctgggctgacagcggcggcgtggatgaagagggagcttgtgggtggtgctctatgccgaggacggctttttctgcctcctgcagtgattttcaaaactctcaccaccccggctgtttccaccaaactctctggcttctttttctgttgtgttttgaatgtcagcaccctttttgaatttatgattgcagaaggaacatcatattccagatatcatcccagaatgaccagcagagaggacggtggacatgtttcttcctaagatcttgatatgacttcaaataatgtagcacaagattggcccatacttaagttttctttccattcttcctttaaaattgttccacactttaaaaaaaaagtttatatgacaaaatgacaccctcaccccaaaatgggtattctttccttgagggatgttttatttctaggccagtttactacttactagtaacactgatttctgaactgtaactcagacttccacagacccctctgagctggagtaaggaccaggaattcagccgaatgatttggagagcactcacagacaaggaattaatttggggtacatcttcctttaggtaatgaatttatttttaggaatttcttgatgtaagtcaaattttggaaatcaaattcttgaaatgcatccagtgtccatatagagctggttcactgcaggaaagcaccatgtgtgcagtgagtggtgaccctccgtggattttcgtgcacgttctgggctctgctcagggacgcagcacggacagaggtgctgtgggccctgcgggacggggagctgatggggcctcgcggtgccatgctgggggagaggctggtgagcatggagtgacctcgatgccccatgctcaccgaggggacttcccctgaacccgtcttccaggctccccccttctggacccatgggcccctgtacagcatttcttgctgaggaacttggggccctcctggctcctctgcctcccagcagcccagtgacctccaaacggactcctgacccatcaccatgtcatgtgggtgccaattagctgcttggaaaaggtcttttttcttcttagccattgtactgggtagaatcatgtacccccaaatccatgtccacctggaacccatgaatgtggtcttatttggaaatagggtctttgcatatgtggtcaagttaaggtgaggtcacacaggctaggatgagctctcagtccaatgactgacatccttagaagaggagggaaatttggaccctgacataaatccacggtggggaaaagctgtgtgacagggaggcagagatgagggggacacttcgaatcccccaaggagtgcacgggcctggggcagacacggccatctttcccatcacggcctttctcacgctcacactttcttcctggaatttgctgattaccgacagagaagaaacacctgtggacctgccccaaggaggagcttcagatcagcatcaacagccggagataaaaggaaggtgctttgggatgatccataaccttcagtctgtgtcccgatccttggtcagcatctgagaatggtccagaatggggatgcaggaggagacggtcactccaactcagcctgttgacttcgtcatcaccaacttcgcatttcaaatccacctttgtccttaaaaatacacgttaccgtgggtttggaaaagttctgccttccgtgggaggttttaaagacaggtgttcttcctctgcctgcgttctgctaagccagagagggcaaagagaaccctaactttgaatttttaagaatgtcaatcttggggcttactggtaagtattcaatgaagaacaacgcctgagagatgctgacattctaaaacacacggtttagaggcctcccaggcaaatgtgactgtgctaggaagcaactctcctccatcctgctctgtgtggatttatggcatcgatggtgggcagctcctgtgttctgcacagagggatccccaggttgaaggatgacgtggaagcaatgacgtcgtggtcagggacgtctgcagggagcaaaatgaagcgagtttctttagttcacaatttctcagaggctctgctcggctggcatgctcgagaacatcctgggagggctgaggctactggccatgagctcttgtcttagaaaagctgtgaccaggttgagggacgctggggtttcctggaaccacctgatacctgctgtccgagatgtgtctcaaaattatcttgcatttcaccttgctttaaaatttgtctctacttatttcatacagagatgcatcatttcaatttcaagaatatatgctccttgattatcactctaaaatagcccataagatgtaaacactgatcaaatgaattgcctccaacaattgcaactatccataataaacagtaagaaaaatggttcacgccttctattcactagccacaggaatctgggcacgctatgagcctctgagtctcacggaccacagagactacaggtcagcatgtgagagcttcatgtaggacccagcacctgctgaacggaggttggatgtgggcatcatcgtggtcgttgagtgtggacaccgagagccttcacacaggatggagggtggatgtggcacctgctgaacggaggttggatgtgggcatcatcgtggtcgttgagtgtggacgccgagaggcttcacacaggacggagggtggatgtggcacctgctgaaccaagggtggatgtgggcatcatcgtggtcgttgagcatggacgccaagagccttcacacaggacagagggtggatgtggcacctgctgaaccgagggtggatgtgggcatcatcgtggtcgttgagcatggatgccgagaggcttcacacatgacggagggtggacgtggcacctactgaaccgagggtggatgtgggcatcattgtggtcgttgagcgtggatgccgagagccttcacacaggacggagggtggatgtggcacctgctgaatggagggtggatgtgggcatcatcgtggtcgttgagtgtggatgccaagaggcttcacgcaggacggagggtggatgtggcacctgctgaatggagggtggatgtgggcatcatcgtggtcattgagtgtggatgccgagaggcttcacgcaggacggagggtggatgtggcacctgctgaatggagggtggatgtgggcatcatcgtggtcgttgagtgtggatgccgagaggcttcacgcaggatggagggtggatgtggcacctgctgaactgagagtggatgtgggcatcatcgtggtcgttgagcatggacaccgagagccttcacacaggacggagggtggatgtggcacctactgaaccgagggtggatgtgggcatcatcatggttgttgcgcgtggacaccgagagccttcacacaggatggtgggtggatgtggcacctgctgaacagagggtggatgtgggcatcatcgtggtcattgagtgtggatgccctccagaccctgtggctttgctggacagagaagtcttgcacaggtgaggagatgaagttgatgttgggctgtgggggcccaagggctcataaaaatgaaagaacacatatttgggggcaccccatgccacacaaataagcacattttgggtaatgggttgaggtggatgaaaactccagtggtattaggactccgtgggtattctctgcccgccctccaattctgaacactctgtccttttccctgagaagccggggtgagcgtgcacagcagggggcatccctggaagggccctggggctccattctaagggcagcgctgggacggatgggtccatgtttcaggaaggcaggtgtgtgccatgcaaagaccttcctaccacgaaactcctgagacgatgggccccagggtgccatcttctctgggaaaggcatgttctcaccgggctgggcgactccccagctgtgacaagtagggagcccaagtgcccccaaaaccatccaagtgccacaggttcgccgtgccatgccgggattacaagcttcaacaacgtcacacagagatgcagtttagttttatttatttattttcaatagtgtgaagacacaggcagacacaaagggcaggaggtcataccgatgtgtttcagatcctggcgtcatccgagctgtcctgggtaagtgatgccatctctccaatacccatgtgccttgcccataaaatgggatgatggcacctgaggattcaaatgctcaccatgcaagggtgctcggaggccctcggaaacccggatctgttccagacttttctggaaagccctgcagagactgttctcaagggcagagagaggaggctccccttcctgtaatcggagtcacgcgaggctgacgggaaagccaggaaagggaagtaaagggaataggaagagcctggggcagaagtgaatttaccaactccggtgcacagcgacatcaggaaatgtctcaccccagtgctgcacaggcgcccgggctgtggatcgccaggaggcccgggctttggatcaccaggaggcccgggctgtggatcgccaggaggctgcagcctgatcccagcgtcactgctgcgacaggcacctccctgcctggattctgccgcatgggtgacgcgtcgcttcccaccttcgtccccagctcgactctccttaggagctcctctctgccaggctcggggttggctggtgtgcccgacacgcggccggtgcctgtgctcctgcggtaactcacggccacgttccaggttccagaacccattcctattcagctttgtcacgtggctggtgaggggagacccgggggcagctggagaaggaagaccccacctgccctctgcatgttgctctatttgctgatgtttgacattcacgtcagccctcacgtctgtgccttcatctgtgtgacctgggcttgcgtcgagtagagaagcacggcctggccttcagatgccctacaggactccaggagaggatgacagaggatgtacttgggtcctgctgtgaccgccatcataacaacgccatggacaacaggcacatttcaataacatggaatgacttactaactttatcctcgctgttttataaaatgcaaatgtaaagtggcttaaaagtaatgatcttgaaagcattaaatctctcaaagggaattttttcatactcaagttttggaaaacaaaagattgataataaaaaatatgaacagactgaaattctgatataagtaacatttgatgagcatttgtaagaagtttgattggcctaatcagattcaagacatgattcgtgacccagttattgagatcttcttttcagaaagagagattttaatttaaaaatgttcacctgccaaaagtcagccacggtggcgggcagcggtccctgggtggcgatgtacgcggggttcctcgggtcgtgatccatctgcagagacaagaccacaccacagcggttagccaggagattaggaagcctggaggttaggaagcctggaggttaggaagccagaaggttaggaaacccggaggttaggaagccaggacgttaagaaacccggaggttaggaaacctgggggttaggaagccaggaggttaggaagcctggtgtttaggaagcccggaggttaggaagccagaaggttaggaagccaggaggttaggaagcctggaggttaggaagccaggaggttaggaagcctggtgtttaggaagcccggaggttaggaagccaggaggttaggaagcctggtggttaggaagcccggaagttagggagcccagaggttagggagcctggaggttaggaagccaggaagcagagcctgggttcaggaagagggaaaggtggcatctcctgaactgagcaacacacaacttgccctttgttgattcaaacgagcacccggcacaggtagggacccagctgtcccgagccttgagcctgaaccactgcgtctgaaatgctttccttatacctgaggttgaggttctaagagcagcatcaacagaaatgaagaccagtagcccaaggagggcaggcagccgttgttagcccactcagcaggtgcgaccccatgacatggatgagctttccagcctgcaagtgaccccagagcttcctggccacggagcccacccaggctgccctgtgttcaggagaacgagcctcttgctagagccacagggctggctggggtgaggctgagctccaagctctcaatggagagtgtgaacagggttcctccaggcctcatggacaaacttgccagcgtcctgggagaacgaactagcgctacctgctgcttccctgctggagttaactcgttgtgtgtgggggcttgtttttgtgtatcctggaaagggggcacaggcacagccggtcagcctgggcctgggtctgtggcagagccggggcggaagggccttgctgggagtggcctcctgttctgtttccccaccaggcagggaccagaaacaaagagggcaggtgtgggctctccggctccccagtttgtccgaacgcatcttgctagctccaatgggagaaggttggcttagaagaccataattattacatttatttcgaagattaagcacagaaaaaagaacttgaggacaaagccttgagaggcaagcgagatttgagcacattgctgaggggcgtcagatggaggtggttctgtcttccagagggcaagcccaggccaccctgcaaaggacacgaagataccaggacatcactatcatccccagggctcaccagctcctccccacacctcccagaagcatctgcagagaccgacccccggagagccggatgctgcgctgggggaacctcaccttggggaggcagccgcttgtgcatctgacgcacagtcctttcttctattgtgtctaggactaaaatggactcttttgctatcagggtttgattcgagatttacaatgttcagatttcaaggtaattattaagaaaacatttctcaacacagtgaaaaatgagcaaattttaaccctatgcaattttaagccaacgcacgaggacatcagtggtggccccggtgctaccttaagtgctgctgcatttgggaagctgacgtggggcacgttttctttaacagcgagccagtgagtccccgtgcagccgtcaccagccccagagatgatggctgtcagcacaaaagaaggcaccaaatgcaccttataattatgttcaccataaaagaggggcgagcataaaggaacagatgtaagttattctcacagaacaacacggtgacgctagccgggggctggggggaagcagggagaaaagctttttgtgcatctgatttagtgattcgtaattaaaactggacctcgttttgaaattcgccacaacacacacaatacaggtaaaattatgttaccgtcgctgaaagccccaattagaatgtttcagtagaaaaatgcttagcagaaataagttttgattttttgaaatatgcatttgttgggggtgacagctatttacagagacccctgtctcttccttgcaaatagtaatgcatgaaaaggaaagccccgcctccttctgaaatgtgtgtgtgtgtgtttttttttttgcccagagcaatttctacagcaacacattttaaaattgtaagcatgttcaaactagcacatttagttgctttcaaaatgagaaataggtgattgaaagtaaaatgctggacagggttgcaggagggtcgataaggtgactgttgatttaggtctgagttgttaaggtgtcctaaagtccacacacccatcacctgctccaatgcctaagacaggagcaaatacagtcagggtgctgggagggggatggctgaacaggaagtgtgggctgtgcagactgagtggggaccggcctcacctccctcccgcccacctgccgtcctgtgggggccactgggaaggcgggaacagcatgatgatccgagtggtgacatgtgtcatcggtttcacaataattcaggagacaattacattcatttaattccaggcacattctgttgaacagaaaattattctgggcagaaggattttgtggaagcagcaactgcaaaggccacaggcagcctccttgtggtctcacgcaggcttcgaggaaaagtcaagcaaatacttaactggccacacagagattttactacatttaaggttttcgggcaggataagtggctgtggaggaaatcaagtgagtttctactaacattgctttttccaatgagggcatctgcgtgacaaccggacatggtgggtgtgtgtccctctgtcttccccacccagcgatcacacggcacctactctggcttcctccggtcttcattcttacccttcgcctcctactcatgactttccatttcattgcaacatactttttatttgtatgactgttatgttcccgacacaaactgcccggctgtgggaaaaggcctgtcatatctccaggcctcagtctccgtatctgtatggtgggtgagctcagggagtgaggagcttggacgtcggcgtctccgggcctcagtctccatatctgtatggtgggtgagctcagggagtgaggagcttggacgtcggcgtctccgggcctcagtctccatatctgtatggtgggtgagctcagggagtgaggagcttggatgatgcggtttctaagtgtcctttagctctggattccagtgcacgtgcatgtgcagactcgtctgtgtgtatgtgtgtgtcctggtgttggtcatcccgaaactgtccgtgaaaacctgtaaatttattaggtgaacgccaagctgtcaggcggtctgcggcccgtgaacacgcgtccatgctgtcctcagtgaaccacagaaggaaggaaggatgctgcttcctcaagcacagagctgctgtgtcctccagtggtgtgcggggccaagcatctgaatggcgaggtgcggtcatttctgagcgctttctccccagacaggggcttctgcagcaacacatcccgcctagagaggccggtaccacagagaatccagtgtgactcactccaagtgacttcatgaaaatcaacagccagaaggcaagtacaattaacagtataattctgtttttacttttttttttttttgagatggagcctcaccctgtcatccatgctggagtgcagtggtgcaatcttggctcactgcaacctctgcctcctgggttcaagcgattctcctgcctcagcctccagagtggctgggattacaggcgtgtgccaccacacccagctactttttgtatttttagtagagatggggtttcaccatattggccaggctggtctcgaactcctgacctcaggcaatctgcctgctttggcctcccaaagtgctgggattacaggcataagccactgcgcctggcttacttttttaaaataaaaataaagcccatttgtctgtgttgactctgttatcccttggttgactgattcttatgaagatgtcatatgaactaggatgctagtgaggtgtgttcctctgtctctctgaatacacagtgtaaagatggcctagtgatgtgccttatgctatcagaggataattactaaacaagtatctttagaaaccctaatctgcatgaaaaacttagccacaatttccccaatattccaaacaaagctcattttagaaatgaagcactcagcatgtcaggaccactggactgtgtcctgcagtcctcaacagcctccatggtggcagaggcacccactgcggggcaggtgaagggaacgccagtttctgctcccaaaccagccccggcctctggcagctgtgaccttaacatcttaagaggatctggccagctttggggaagggcatgggtgtcacgtctttactctgaaatcttgcacagagaataagcacacacctcatctgtaggtatttctacctgcccacctctccacctgcccacctctccacctgcccacctctccacctgcccacctctccacctgcccctctccacctgcccacctctccacctgcccacctctccacctgcccacatctccacctgcctacctctccacctgcccacctctccacctgcccacctctccacctgcccacctctccacctgcccacctctccacctgcccacctctccacctgcctacctctccacctgcccacatctccacctgcccctctccacctgcccacctctccacctgcccacctctccacctgcccacatctccacctgcctacctctccacctgcccacctctccacctgcccacctctccacctgcccacctctccacctgcccacctctccacctgcctacctctccacctgcccacatctccacctgcccacatctccacctgcctttcctaacatttaaagcaaattgcatgaaacgctttcttgaaaaccaccatttgacttctcaagtctcttttccaaatactaaggcttaatatgggaatttattgggaaattgtagcttcagtaatcaatgggagattgacttgttttttttgagacagggtcttgttctttaccccaggctggagtgtggtggcatgatctcggctcactgcaacctctccctcctgggttcaaatgtttcttctgcctcagctgggattacaggtatgcaccaccatgcctggctagtttctgtgtttttagtagagatggggtttcaccatattggccaggctggtcttaaacttctgaactcaagtgattcgcctgccttggcctcccaaagtgctgggattacaggcatgagccactgcacccagtcagcagattgacttttgaacttgaaatatttttatatcgtattcttaggagttgagatttacttaagtaaaatactgaatataaaccattattatacacagaattttggttgtaaataactgaagtgattcccatatttggccaatttcttatgctagtcagaacatccaacctctcttctttttctgaaaagccactctgtccctacatagttaaatgcattctgaattaaaactttaaatgatgtttttttctcccttaatagacagtgaaatgaagaattaagctagtttttacacgtcactgggagtttcagagttgtcctggtaataaagcttgtgtgctgtgtttgagtgggctgttgcgtgaacaccattcctcaacttggtgtcctcagtaataatcaggctgttttaaatgtagctcatgggtttctctctcagacaacctacgagggaaaacagaattcccattgactttcatgacctctgatttaaaagcaaagattgcacattatttaccactggatgccttccctgaaatgtaatgaggactaagtacaaatatgacagatgtaattatcatagttttatcctgcacagccagggccttcctttgctgtaattgtgagcttttcattcagctgctgctaggaaggtaattatcattgtaccttcagctatttcataaagaagaggcaccatcgatttcttctgcttcattcttacaacccaaatttggaaaaaaaaaagaattgtggtatgaaataaaggaaagacacaaaatgtaccataaaattacttctccctcctggccttgccttctcacccaagctcctgcccagtaaggcctggagagggagttgcatgaatgtgcaggaattcatcccccaaacacacaccccctctggttcccacatgggatgaaagctgtccaccgtttccagctcgacacagttgctgcactgggcactgctgcccacgctggggcttggctgtggcctggaatagcgcagacatctgcaagttggaacccatcgagtgggggagagtgggcccagctgcaacgctgaactctcgtcttttaggcttgtgaatcacggctttattcctcattctggcttcatcaaatggttcatctcagggaaaagggacctcaacatggcttttcttttccttcggacggtttcgtgttgccaactctgctgcacatagtacaggaacggaatccaggcgcgcacacctggctttaccagaacgcacgttctgttcatcaagtgagaggctggcacatcagcgaggctttggtttgatgtttttgaattagaattgatgacagaaaaatactatgtgcatcacatcttattaaggaagatgaatgaggatctttgaaacccacacggaaccaagcttgggagtcaacctctgctggaaggaaggaagtgattccttcttaagaatgaacacataaacagaaacctgggttcaggtggtgtagaccaagtacactaggccagttcttcactttgaattcagtctctcaaagctgaacatgctcactgtgtgggccacgaattgcgggaaaacgggactggctcaggcatgtggacatcttcccagcgtgctttatcccacaggtgtgctgagaccagcagagccgagagctgagcaccctccaccatcagtggccgctgagaccagcagagccgagagctgagcaccgtccgccatcagtggccgctgagaccagcagagccgagagctgagcaccgtctgccatcagtggccgccgagaccagcagagccgagagctgagcactgtctgccatcagtggccactgagaccagcagagctgagagctgagcaccctccaccatcagtgaccgctgagaccagcagagctgagagctgagcgccatctgccatcagtggccactgagaccagcagagctgagagctgagcaccgtccgtcatcagtggccgctgagaccagcagagccgagagctgagcaccctccaccatcagtggctgctgagatcagcagagccgagagctgagcactgtccgccatcagtggccgtggcctgcaggcagttgggccaatactttcatccaaagctccctatggacgagcaaagaaactttgggacaccgtagggtgcgatttgtgcctcgatcacctgccccgtctcactcagccctagaacagcattgcatcctgcaggcaccatgtttgattaaaggcaaatttggaattttagtgagatgtcctcatccttccctgaagaccagaattgagaagagctgtttaaagggggaaacatgacaaccagtgtccgccataaatctgcatggagccccagcctctccaccactggtttaaagtgccatccgccaggtctccaaagccccggccctggacagtgtcccatcccgcccccgccacctgccaccatcactgctcatctgaacacccagtccgagtgtccccagcctgtggcttcagccctctccatgctcatatctctccctcctctgctcactctgggagggctgcaaacctccccattcagccctgctcccccgacaggtcatgacagggaagggggatgcccagagttaaatagggtgagagccgcgtctagcatgggctgagaggagcccctgggaagtgagggaccacaggccacagggactcataactcacggcacaggagctgccaccacactcgtccccagaaacacaggacagcccgatctccactgcacctgcgtctatcccagggggaggaacagccagcaaacggtctctttcataagaaacagggtcccattcactggaaatacttcaggaaaacgaacctgaaattctggacctgcctccaagccactgattgttacaaaaagcgtagactgaggcctcatgtccccatgccccatgaatatacagggaatgtgtagctccaggaaagaggaacggcacccactacgaacctctcctaaaagccatgtcttctagtcaggaaactgtccagtcaccattgctggatgttctacaagtcacggaacccaccgcccagcgtgagccgggacccacacggctcataaacagccccgctggtgaaggaacaggggagtggcgggagcccaatgggcagagtcggccctgtccaccgcagagacgctgagctgggtggggacgtgatttcccccgagaaccttcccacgtgatttgccgcgtccgtgccacccaagggaaagcctggggcccctgtcccggcagtgcacttacgatggggctagcgttgatgtagtctgagtggctgtggctgttctccgccttcagcaggacccgggagtggtcatctgcaaggacacagtgcaggggtcagaggaacattggcccacccagcagtgtgagacccccacttggcctccagggccccccacccagcagcacaggacccctgcccagcctccagggtccatcacacagcagtgtgggactcccaaacagcctccagggcctatagcccagcagtgtgggacccctgcccgggctccagggcccacccgcatcctctcccaggactctgctcacacccttctgaatgtggtttccaatgttcctgctcccatcctcccctccgtttgtgatcctccaggtgggaggcagacgaacggcatgtggggaactggcacaaagctcccgctcagcagaatggagatatcctggtgttttcccccacgtggagttcacacaccaaggtcaggggttcctctgcagaattttataccatgctggcctttaaatcacagacacacttggcaacacacagcaggtaaacagaaatatgaacgttaagcaatcgcccgcgtttcaaaatagaaagtttcatagtcaatgaacagttaagtcctcaagattactggaatttagttttaaaaggagagtaagagacaaataaaatgcagataaagaggaaatggaggaaaaatgtactggtggagactggcataaaaactcgctcggacagacagagtaacctgacggctgctgaagccgggcgcagcggggggacagtaggcacttgtgacgtgtgtgatatgagagctgtcttggctttggttctgggataacccccatcctgcttgctgtggccgccctcctctttgctctgtttttagaaacttcgacaagcagagctcacagaggagtggaagccgcaagagcccctcctgcacctcccaactccctggtgtgtggccgcttccttctctctgcaaggtgcgctttgtgttacaggatctttggggtggtgtttttctggccagaaatctctgtggccggtggcgcctttgcccaagttttgctcaggctgggcctggcaggccacgtttggctcacactaccagcctgggtcccatgcctgccaagggcgagtcaggcatggagtggcgaggggtgtgtgaggagcacggggtctggccacaccagtcaggcacgctgggtgctgcagcagggtgggcagctccaggtgccagcatgggtgcgggctctctgtgaggctgcggccagaccagacacactgcaagcagcttccatggttgacactgaggaacatggtagctcctggaagtttggagataccaggaaccacagggtcccaaagatggagtcacaggcctagctccgggagctcccaggtctgggctccctgaagggctacagctgttctctccttctcttcacccacagtgtggcgagcagggggcatgtctcagccctgtttgtgctacagctcttctagccccaccattcgacaggtcctgagttcttgttctgcgaccaggaagaatgaggtatggagacaagtggaggatgagcaagatgaagaggggtttatcgagcaatagaacagctcagtctcccacagggggcagctcctttctgcagccagggggtcccgatgagtgttcagctcctagcaaaggggaggctctggagtgggtagctcctctctgcagctggtcatccccatgtctgcccagctctggctatgcctggggcatttatgggcctcagaggggaggaagtacatgctgattggcccacgagtggccgtgggcaggcctggaaaaggcaccatgagttcccactctgatccacaggacttgcagcccagcccccagccttcaaaccctccctggcctgaaggtggtgcttcatggaggacctgcccccttttgcccaggaatctctgtctcctgctgccattcatggcacccaggctgtttgtgccaaggggcacctgcaggccagagctgagctgccctcagccctccttcggcttccctcccatgcttgttggtgcccaaagtccagagggggctgaggtggcagggggctggtgtgtcagcactgcccagagtgtcacacctgctgggctgtgacagcgcccgggctcagccctgactttgctccaagatcagcatgggtgccaacagcagggagaatccaggtagcaggaacaggcacttcctgcaggggcaaggatcttcttcctgggtgcctaagtgtgcagggctgcctgggtctgcagctacggtttgggcagctgtagctcctccccagcgtgggggtgggggtggggtcctgcctgccgcgtggaacaggatgcccaggttacgcctccctgctgcagctggtgtgatggtagtggccactccagagggcctgtcactgccatccctggctgaaatctggaagcaacaacatctcggctctgctgccgtttgtcccagggaaaacctcttggtgctgcacacaacaccaatttccatcttttctgagaaaacaaaagcaccctcgctggagccctcggaggccagtgcttggtggccgtgggtcccctctggacctgtggccaaactccaaactcgctgcgcacctcctgtgggcgctggcaccagaaggaagtggccccaatcatggagcagtgtggtggtggtgaagctgcacggactctgcttctctacgcaattctttcatttttcttggagattttacttacagtttttaaaacaacaaatcctagggcttggaaaacttagtgagtgttttaactgattgaactaggaaagtactgtgcactagagatcaatacactccaggttggatgctgtcctgacaccttccttcaggtaggaatgtcagcctctttcaggggtgacaagatgggataagataaaacatctagagagaggagaagaatgcatgtgtacatacgcacatgctctatgcagctgaatgcctcaggaatgtcatgaagctgcaagtcatcccatcagctctgaacgaaggtgtgaatgatgcaaaaatcccagggactcaatggcttttagctcctgcacaaattagttcttggagagtgaaaattggcagtggcaggaaattgtaatacaaatcatcagaaaaaaactggttgactctgacatctgaacaccccacacacactactccaaacattgattccagaaacccagtttcacagtggggccacacagacaccgcagccagagatgaggctgtggtcagaggtgctgggctgggcccggtgctgcagcccacacagagcgtgggaataaaagcaggggcttctggctgcttccaggggcctctagggccctgcctcattttcagcacagccacctttaggcacttgtgagaccagcaactgcggaccgttcttacgtgtctgagaaggcattaccaagagcagggtcaggagggagcagggcagggaacaggcagcgcagcctggagccctcaggcttttgacctggcttggtctcgtgctttgatggtgcccacggcaccctgagaccagtggcctggcctctacggagggcagaggaggcatcagggcagcgtgctgggagctcctcctcagctgaggggtccctgctgccaggccctgtgagcaacaggccacggggaaagtggccactgccattggactcagcagacaagtgccagctggattttctcattggaaaattaagaaaatgcttccctagctcgggagtcctggggagttagacatgcattctacgagcccggccctctcctctcgatggcagagggggaatctgccatgggcacctgagccctgctggcaagtggacaatccatgggcttcttggtggaaaattgttttagccgaattcatttcccccgaggtcaccctttaaagatggcactgagtcaaggacccggcttccatgacttcggagagctcctacttcctgatcgcatatttgattttgtgtcaacatattgcttttgaaattaccagcgaagtcttttttttaaagagacagggtcttgctccgtcacccaagctcaagtgcagtggcacaatattggatcactgcaacctccacctctcgggttcaagtgattctcctgcctcagcctcccgagtagctgggactacaggcacgcaccactgcacatggctaatttttgtatttttagtagagacagggcttcaccatgttggccagggtggtctcaaactcctgacctcagatgatccacctgcctcggcctcccaaagtgctgggattacaggcatgagccactgtgcctggccagcaaaatcattgtgtttgtaatatggggtcatttggaacctccgggaaatgcttggagccatcctgggagggccaagggacgctgcaggctgtggaggagggcggactctgattcctgcagggggcggcaaccgttcctcgtgcggagagttcatgtgcctggcgaatctctattttgtgattctcttactttttatgagatgttttgagagcaaataggatgatgccatccagttcccgagtcccctaaagggcagtttccttgacgtgcgaggcctgtggaggggtcttcgtgttctatgaagtgaagggaagcaggtggcctggggcctctcaaggccaaccccaggctggagatgaagccagggcaggcccacgcgcaatcagccctggcctgtgctcggggaactgaaggctgctcccttctgttgtcaaatgaaatatcagacctccctggggaggcaacacagagcaatggcgggaaccacagggtgagaattcataacagcctggggctcatgtttccattaagaacgggtgtgctctatcaaaaccgtagtctgagaatttactgagaggccaggaaaatgtgggaactcacgtagagtcttccttcacctggccctataactgagttaatgtcattgggttaaattaacccactgtgcacgttccttttctgaccctttactgtgtttatcatgcgttagtgccttgttcaacaatatttcaggccggccgcggtggctcacacctataatcccagtactttgggaggctgaggtgggtggatcacctgaggtcaggagttcgagaccagtctggccaaagtggcaaaaccacgtctctactaaaaatacaaaaattagccaggcgtggtggtgggcggctgtaatcccagctacttgggaggctgaggcaggagaattgcttgaacccgggaggcagaggttgcagtgagctgagactgtgccattgcactccagcctggacaacaagagtgaaactctgtctcaaaaaaatttttttttaaatataaaaaaaaagagtatttcaaatttctcagatgttccatattttcacggattagatcctcttctctcatcctggacccagtggccatcctggaccacggacagaacagggactactttcccgttttaggctgaagaaactaagactcataaggatggaacgattcacgtggccacggcctcgtggtccacaggggagcacagggtttgactcccagccccactgcttgccagcgggcgatcctgggtaaactgttcagtgttcggagaatgcaggatgataacatacaactcacagcactgttgtggtaaatggcacgcagcaagcaatgaggagcaaggctgagatgacggtggacacgcacccaactgcgcaggtcagccaagctggcaaagcgtgttcttgctgccccgtggtggcagaacatatggagcgatttttcatagatgccaacagaagagacacatcccacaatttcttgttgattattactatggcaaagagccttgggagatggcccagctaagcatgctagaggacgcggcggtatagtcattaatcatgatctagaacctcccgtgcccaccccactgcatctgaggaaagcgtgtggaagactcctctgcccggaacatcgtcttgctacacagatccctgaggacggcattcccccaggcctcctggcttgctgtccacactcaggaagctgctctgcagggccaagaatctgcctcccaccagcacatgggctccacggtgctgctgtttggaggatgcgtgaggccatctgtgaagccactgctgagtccaggggcctcacggaacttggcaatggggttccctcctcccaggggcctcacggaactcggcaatggggttccttccactcaggggtctcaggtgttctctcgggctctccaactgcctctgctttctgtgaaggtttaggctcagtcatttatgctggcaggaggccctcttcttcatgttgatggtgtggcctgtggagaggtggagccggtgtcttgctcctagagggagtcctgactccagcagagaacatgttccgggatgtgctccacagttggcaccagcacccacaagctcctgctccgagtttatggtgtccatcgaggtctgagggctgcaaaggcacatcccggggctgctggccgtcagcaagggccgtcagtgctgcttagggatcccagcggctcacacacagaaaggcctttgaacttgtcatagttgaggcaaaggaataaatgatcggaccacgtttgtttcaatactctgagaagctacatgggcttgattctttgcagacctgggcacttgaagaccagcaacagcgtgatgacagaacgcattctgaaggggcaggtcctcttcctcccacacgctcctgtccttagtcagcaggcagacattctgcttccaactatgcctttgggaaatgctcagctcaagctataaagctcatcgaacatttaggaaagtcagctgagtgtcattcagggcctccgcagctcagcatacaatgctgcatctgggcagactgggacaggctggggctcatatccagaaagccctgctacatccagagatggtcatgaaaatgagacctgccccacccaccactcaggaggcacgctgctcaccgctgagctgaataaccgagcgcgaggctggtgtccggcttccacactggacgcgtcaaaagcaggtcccagaggagcaacagtggccccaaatggcatggtcacaaggctggtttagtgtctcatgtcttaaatggtttcactggcatcccccacagacagatctctcagaaagtcgccccccaatgggatcggaagcatgttgggcaggtgacctggggcaggtggactagaaggagcctcaagccctgggggattcccatacctgaagcgattttaacccacactagtctcatctcaggcatctgtgtagaaggaactccccaggcagggctatgcgggggcagaatgcagggggaacagacgccaaaggtgtgtgggggttgccgtggccaggcagcgcccgcccagtcactgagctgacttggaggcaccaggtcccagggttgagctgcgtaccctcccccaaaaagacacactggagtcccagccctgggaacatgaccttatttggaaatagggtctttacagaggtaagcgagcggagggcatttgggcggccctaatgcaatatgactggcgtgctgttaggaagaaggactctgcacacccacacgggagggagagcgcccgtgtgaagacgaagacagccgcggtcatgctggggacacgcggagggagcgcgcccgtgtgaagacgaagacagccgcagtcatgctggggacacgcggagggagagcgcccgtgtgaagacgaagacagccgcagtcatgctggggacacgcggagggagagcgcccgtgtgaagacgaagacagccgcagtcatgctggggacacgcggagggagagcgcccgtgtgaagacgaagacagccgtggtcgtgctgaggagcgaggcctccagagaagccagccctgctgacaccctgacctccatttctggcctccggaatgggagacagcctgctttggccacatacactgcccatccctggcgctctgtccctgcagccctccaggcccagagcacctggagcgacctgggtttggcttcccatgccctgagcagcacctggtgcctgcacggagaaagcgccgcctggagccagcctgcagttgtggagtgtgggcaacccagagaccagctccagacacacagcgaggcgtggctgtgtgcgctggtggcgactttctcgcaggaactagaacagtttgctgtaacaggagcacagatatcagacaggcagggccacgctgtctgcacggctccaccgagaggccgtccatcgacactgatgacgaatctcgtctgtgcgagcagcgcagatgagtgtggcggcggcaagacagagacacaaacggctggggggcgcctccaaggagctgaaactaggagcagggggcagctcacacgccttatcaccaggacacagggtatcaccagaagaacagctctggcttgtggctgtgctgcctgagattaacgcccgttttgtggatcgggggcagaagctgcacctgtgaccgacggtcttggggctgccaggggagccgcagaaggcagtgacctctgaccccacagcacggggcgcagggcagactgtgccaagcaggcgcgtctggaaaagtaagggaggaaattcggcgggaacctacacattagctccctagaggcgtaactgatgggcaggtgtggaaaacgcccaaacagctcgcgggagcaactcacttccgccgcacgggaggggtcgcggtcaaagggcatccacagaggcgctggggtgaagcggggaagcgggtgggagcagctccggcggcacaccccggccagggcagggccccccacaccccacggcagccgaaggccccgcctccccgcccgggtctgcggctccgtgaagacacagcagctccggagggttgatctcactgacagggagagtccctgaggaggggccggggtgcttccggcctgggtggccggaggaggaggcagggagagccctgcggctgaacagggcagcgccccccgcatccggagggacaggcccggccccgtctccagtcccgcctcccgcctcagccgcagaacctcggtggttccttcagctcctgaagcggtccgcaaacaggtcgagggcgctgacgaggccgttttctgggctaagcagcgacggcgctaggcgactccgcttgtccttcgtttccgctgtcagctcagcaggtgacttattcccagtgctgctcttctcacagacacaaaaccaacagttccggtctcttccgatagttctggcagagacggctgcggggagacacgggcggaggcgggtccgggcgggccccacgtcgcgcagcctcagcgtgttgcgcctcccgcggctgcggccagagacttccgcaaacctcggggcctcaatcgacagaacgtgtcacctcaggcccaggagagcagggtccggggcgcgtcctcagaagccggcagggcgggctcctcgctgagccgcagggcgagcccggcttgggcctcttcccgcgggaggaggccgccgcgttccttccccggttctccagccgaccccgccgcctccgtctcccacacgcagggaccctctcccgacaccggcctgcctggaacgtgccagaatcgtctccctaacccggcggccgtggatgagcaaacctgcacccgcggcagcctgaactgccgtttgtcgcgtagtcctcgagtctcggagcgcaggggtcccgagggcaccccgggccgccgtcctgcggcccccccacagtgtgccgggactcggggtctctcaccacgagcagacctcggcgctgctatccggactcctcgagccccttacaggccacatggccaggggcgaccctcccgtcacaactgtgactctgtgagctcacagggctggcctccacattcttgctggtggaagaccacaagcaacgggatgccttggaaagcatcgttctgcagcaggactgctcaaccggccaatcagaacacagggaaccatgaaagaggtgggaggaggaaaaaggaggacggagaggagggggaagacaggggaggaagggggaggacaggggagggccagggtggagctcagggccaaggcagggtttgaagtctgtggcccgtggcaaggtcgcagagcaggctggtcatgttcctacagcatcgtggagacctgtacactccgggttcttgggaaacgggggttctggaagggggcaggtgagcttctcgtgggcttgcagagttccctacagacttccacatggagagtctgtgattgtttggaatgggaaagtggtcactaaaagaacagctttattaggtaccattcatatcaggaaaaaaagtcagggacagctgtttcaaaattaaaaagacgaaagagacacaaaacccaaaatgcaatgatgaatcttgactgcatcctggtggaaaaaacaaaacagacaacagataacagaccgtgttgtagagaaagcggcgggagtccctgggagtgtgtgatagcaatggcgctgtgggctgagctgtgccctgatgcccctgtgtgacgaccccaacccccaggactgcggagtgtggccatgtttggagacagggcctctagagaggccagtaagtgaaggtgaggtcctgagggggggcctagtgcagtgggtctgctgtccttaaacaaaggggacccttagttacagacagcacctgcaagccccagggagggcctcggacacggccagccctgccacatcctggaccgcagcctccggcctccaggactatggggaaatgcaattctgtggtttcacctgctcatctgctgtctccaaagcctgggcagatgggcacagctgggtgttagagggcactgagggattgttgttaattttcttagttataacggggctgcagctacctaggagaaggcccttgtatttaggacctgcaggcaggctaaagtatttggacgtcatgacgcctgatacttacttgaagtcgtccagccagaaaataaatgaagtgctcgcaggtcacgctaatacggccaacactgggcggctggccagcgtgggtggtgggtgtgcaggcgatgccacgctaccccttccacttgagtgtttaaaactcttgtaataaaaagtgggggaggaagtcatgctaagccagccacacttctgctccagagagggccctgcaagagcggtgtgcgtgggttgcggctgggtctgcgctggggtagtgtaggctgcactctccggggagccgctgaccttgggctccctaacctccttcagccccagctctgtccctgtgtgaatctcagggctgtttcgaggatgaaaaggaggtgtttagccccgagcctcacgtggaaacatctgatgagcctttgccaatatgctcgggacctggggacggctggggtgaccccatcgcaaggccgggccgtggaaacaatctcagccctggaaccagcgcctgggaagtcccgcggtggatccgcgtcacgggggaggattggctcagcactggtcctgcggaatgtgtttttatcaatgacttgacgacgtgaaaaacatgtttataaaacgagcagatggtgccgagctgagagggaggtgacgcagtgactcaggaaccacaagctctggaggctgaacgagaatcggttacaggagatgaacacaaggctcgattctcctgttaaacttgactgtcaccaacggggggtggggggtgcgcgaggccctgggctccaccgaagaccttaaggaaaagactctggatgttagtgggttcggcctcagaatcagccggcgctgagatgtgcacctggcaggatgaacgtaacttctggtggataaagtgggaggcctgatccaggaagaagcacaccgtggcctggggcccctctggagggtaggtcttccaagtcacgggaaacagggcgcccaggagacggtgagcccggctgctgccaccccgaaggccaggctcgccccacactgtgagaccctccccacacgaagattctgtaagcggaatcggaaggaggatgtgagaaggacgggtagccatgccacaccaggccagacatcttaccaacctatcggttcagttttaagaaagagagcaaagaggatctaaaatctgaactttgagcagctgaactgtgtggagtatcaacgtggctcctgacaaccccaccggcactgtttctttgcactggaggtcctgaagagctcacggaaggtgcacttgcagttgtagttcagagatgatgcttttagacaatctttcccttcgagaagtagcctaatgagaaggactctgtagatctcttcctaaaaaagaatcctcagtctctggcagaacagctgcccagaacagcttctgcctgtgaggtagcaaagaaaaaggcccacacagaatttgctgggatattttctttccaacaccaacaaaccgacagccttcccaaatcctagggcagagtcggctggcactgagatcaaaaggggtgaagggaaggcagccaggctgggagtctctctccagcaactttcttggcgaggtgacatatatgcccagaacctttttctatggaaggaaaaagaaaaccctggcttaatcatcagagttaggagaatcacccacgtattcatctttaaaagcaaatcatgataacttttggtcactcagaagtaaccaaggcaaaatattcctcttaggggactctgtttagagttttgggagagaaaaaaaaaaaaactaaaccaaaggtttatttagaaataaattgttttctgagtattctaaggaaagctatgcttagccaaagtgcttcagcccttgtacatgtttcaaatacttctgtagaagtttgaaatggacatggattttcccaacacacacgcacaatctcaggtgagcccaagacagcctatgaggatggcactggggagtctggatttcagctctgacgggcgggctctaaaccccaaagttcttgtcggccaagtgggggggtttcttgtgaggaccagaggtggcacatccacgggcatgggggacgctggctcacgatgccccagtgatgccgtggttaggacactgctcacgcagctgcagcgcagagcacgggggacgctggctcacgatgccccagtgatgccgtggttaggacgccgttcacgcagctgcagcgcagagcacgggggacgctggctcacgatgccccagtgatgccgtggttaggacgccgttcacgcagctgcagcgcagagcacgggcgacgctggctcacgatgccccagtgatgccgtggttaggacgccgttcacgcagctgcagcgcagagcacgggcgacgctggctcacgatgccccagtgatgctgtggttaggacgctgttcacgcagctgcagcgcagagcacgggggatgctggctcacgatgccccagtgatgccatggttaggatgctgctcaagcagctgcagcgcagggccagtgtggtgaccctgactcctgggaacggtgatcagctgggcctctgcctcactggaccacgctgcaaggcaagggcctgggagatgcccacagccgcgcctctggctgtgaggcagctgtggtcctccagcagcaatgccctcagaagctgggagatgtgaaccccacatgactctcctccttgctgtcttcctgtccctgagccttcagctcttcgttgtctctgtcttgtctctctgcattgtttgtcctggttctctctctctctctcgttattacaacatagagccaaaaatacttttttgtttaggatatggcaccaaaatagtatcatatccctgttcttcatctgaaatgcagacaagcgaaatgctgcataattcttttttaaacattcaaaaaacagaaaatgcatgttaagttctttaaacttctgagataatacaactagacctagcatggtgccagccaagcattgcataatgtgtgtttccttctcctttgggggctcattccgatcagggtgcatctgggaagtcgggcgactgtgtccatctcctgggtggaagaatgacccagggaagtgctccatggggaaggcggggcatgagagaagggaggggtggtcccgaggaccctttccatagacctgggagttcccggtgagcacgcggaaaggacgcggtgggagcggcaggtgcagagggaggacttgaaggttccatccctaacagaggacagcgtggccgagtactcatgcttccaaccctgcacagaggatagtgcatgcccagcatgcagactcgcttccatcgcgacacagaggacagcatggagcccagctcgagtgccgtccccccaccatgacagcgcagcatgggccttccaagccacagagccacagggaagccagtcctcctggaccgtgtgtggctgttttggagccagttgtgtcctgtgaagagcgcagcggccgcaggtgaggcaggagtgaagatggaggaggcggccatctctctggggcctggcaacagcgagagcttttgccaagccactgtctcccggaggacaagatctccttcccaaaagcaagatggccaagagtatggagaagaaagtaggtaatacaagtttgctcagaataaacctatgtgttcatgaaaatatttctatctagggttctcccaggaggtgaacttgccgttctctgtcttccctggtggcctctcaaccctgaagggcagtgctgtgtcttcacaccctggcacatgggtcgggagaaccctgggaggaggtgcaggcagcttctttctggctccagtgcgagtctcgggagggaggtgctttccccctcacccgtcacctggctcagaatgggcagggctgtcctgatccccatgagaacatcaggcgcccatccacatgtggccaccctgttggcaccggctgctacctggggaggctgcctgtgtcccatctgagcacggaccacttcaccatcactaggtccctcgcccccaacccccccatccacactgtacagacagagcccagaaggctgcagggcacacgggaggaaaaccccatcggcaggtcgtttctgccacgctccgggctgtctttggggagggcgtgctgtcagatgaatatttaccatgaaacacctcacaatctaagtaaatgaccagacacacagagacatataatgcacgcttactgcatggctatttaccacgaaccattctccactcaggactcagcaggatacccgctcaccaccaccctcacttgtcctaccacaccggcttcactccccgccctctcctcccccaggctgctcctctctgaggacagtggccaggcccccagagcctgttagtagcccccgacacagggccggtgcttagtaaatatctgttagttggctaatgggatgtattgtattttgcttttcttctaaatataaaatttataaatcacacagcttctgtttttagatctctttagggttaaaaccctcagacctcatagaaactggtctgaacactaaatgggtagcaagaagcgtgcacccagctgggtgaatgggattttacacaggtctgcagtgccccaggttagtttctgaagcaaaacaagattccagcttctcactgttctgacctgtaacacttcctgagggctggaaggagggcaagggcagtgcctctccctggcgtggggggctgtgctgctggtacggggacaggcggtgtctcagggacaccagtctgatcccttgaccggctccgaagggttgaggcagggacacagtgacggagagacggcctcggccacaggggacactggtcccgcctgatgctgagctgaaagtgagtgtggccgagtggtgctctcgaagtgtgagctgacgaagctccctctgttgcatcagagacatgcgcaagggccttgtcttagggtcctcaggagagtaactaagaaactctacccacactgtcatttatcattcatcactcaacgttgtgagtatctacttccccctgaaactctggtcaggaacatatctaggacccccttcctcctggcgggtgggtttataaccaatcaaagtgtggaaccttcattggaacctgctatacacatagaggatgagtgaggtggacgccagcgccgggcagtccttgccctcctcatcttgtaagcagcttagtgcctcccgtgctgtgggaacacgaggcggtgtctcttccagtccacgagagtcactcggagaactgctggcttatatttccattttctggcagtgatccctagctaggtagtaggtgctcagtttgtggaaataattgtaaagttaaagatgctgtaaaagcaaccactgttgattgtgtgcctgcgacgtaccggtgctatgctaatgacctcgtctaacccttacagcagtaatacttcaaggacgacagcgtgaccccaattacagatgtgacgtggaggctccaagaggttcaggaacatgtctcaagtcactcggtgacagagaacaatagagctgatgctcactggggtgcagatgtccccaggcccgtgctggaggaaaggaagacactggttccttgttggttgggctggggatggcatcgcagaggggagattcccaggagggccttcccagagggggcaagtctgctgcaggcggggggtgccgggaaggagaagcggagggctttgcagaccctcaggatggggctgtttcccccgcctgtaacccaggcctccctccccggggactggtacacacaggtcagcatggccagtttcccccgcctgtaacccaggcctcctgcccccgggactggtatgtacaggtcagcatggccagtttcccccgcctgtaacccaggcctcctgcccccgggactggtatgtacaggtcagcatggccagtttccccctcctgtcaccctggccacctgcccccggggctggtatgtacaggtcagcacggccagtttccccctcctgtaacccagtcctcccgcccccggtgctggtatgtacaggtcagcacggctagtttccactgcctgtaacccaggcctcccgtccccggggctggtacacacaggtcagcacggccagtttcctccgcccggaaccctggcctcctgccctcgggcctggtatgtacaggtcagcacggccagtttccaccgcccgtaacccaggcttcctgcccccggggctggtacgtacaggtcagcacggccagggagcggttcttgggcacgttctcctccctctgggccacgaacgagctgttgggctccgcctggtaggcgcacagcgcttcccactccttctccagccggttcttgttcttcaggtggtcctccatgtaggactgaaagggaaacacagggtcaggagcgcacctaggtggtgagcccagaccggcagatgcacaaaaggcagcggaggcctttgcactcgccgcgtgggccatgcccaccttgctcacgagcctgggccatggtgcgacgttgtgctacggtgcacaatgcatatcataccatgcaaccgttaagtgaaatatgtgcattgttaacacacattttacatatgtaaatataaactccggtgtttgggaatcagtttaccgctgagatgacaacaattatcacatgctttaacgacagggccagggagctcagaccaagctctcggtggggctgctccgcgtgcccatttctgcttgcatggaagtcatttttcttaaaaccggcgcacgtttctgaacccactgggtgtgatgcagttgagagactgggctgctctgatctgtgcaaaatgcgggacagcttctagcatgaaacaaacacaaatggatggaagcaaatattttaacccttggctgtttcgatcttaatttttctggtgcttgtcgttgagcattactatgagtagacaaggaaacaaaggcctcctgaaaattcccttccacaaaaacccccatgccgccagcacagcccactcggttcttattcatctgtaccgttgagaacaagccctgattttaagaaagaacatttcaaaggaccaaacccagctgcactatggcaccacaggaagtgacggcctcgtctgctgtcactctgcttgtggatttgcaaggtactgtgtgtcatgtgtagacacaggttccaagtgtgtccacacgagaaaataaagcatgcatgtgtacacatggtcctttgctgcaaagcggccacgcattccaatgtcaggcccggggtccaagcccttctcaccttctgcccaccccctgacatccccttcgattgatccgaggagctgggatggtccctccctgcccactggggcccgttccaggagacaggtagagaaagagacacagagggagggagggctggacacggcgaggcgggaatctcaggtcatcgtgccgtctagtggaagttttgaccacagccaacctgaacccatgcagcaaacacacaccctgctgtgctggcccagctcacacgggagcaggtgcatcgggcacctgtgctgtttgcgcgacacccccgcatctgggtgggtgtggtggtgagggacaatcgcctggctcagggtgggcactctaaggccgtctgttgggaggtcccaggttgtcactgtcacccccaccatggccctgcttgagctagttgggaaaagcagagggactccagtgccgttgagaagccgcaccgactgcctgctccacgcagcgaacgcttttcccccaccacaccttgagccttgggagcacacctgcgccaggaacagaaacatcagggctgctctgagccaaagcgaacgagttcatctactcccgtcaccagccccgacacccaggaagcctcgtggtttccttgtgcatggaagaagcaccccacagagatgtctcgagttgtgaaattaggcaaaattcaaatggctcaatctaggaaatgctacacattctttcttttgagacaatcattatggaacatcaaattcatatttttgtaccaaagttaccctaataggaaaaacatttttggatgatataatatttaagttttgtgaaaatactgaccagctcatctagcccaaatctggtgtgtgagggaagctgggaggttgatagttatggtgaaaggatagtcccagtctgtttctgtggctacttttctcaagttgggcttacgtagagttctacaaataggtaggtcgaaaatggttcctggcaaaatcattctgggtcctagcttttctttgaaaaatgctcttttcataaaatccatcacaaacaaatgggcttccttcagtaaaacatgatgggttctaaaatgatgaaccctagcaggtttaatccaatcgaaaatattatctgcaaaagaggcactggatattatcttaattcgtataaactacagctatttaaattctcacatttatcttaactataggaagcaaaattacactctaagttctcttgaatttctaaatttatggcaaaaatataaactgagcctgtgtggcccaaggttgggtggtaggagggaggaagaggtagatactgacgcgatgttttttcacggagaatgaagtcatctgcagaggcacgtgactctattaaaactgagatagagctgacatctctctgcacacgccactccagtgggctgtgtttgtcccgttctgctcatttcaatttgatctgttctgtattcttctatcaatattttttatgaaacatcctttgtgatattaaactgatgaaatatcccccaactacatcttaggagtcttttttctctttcatggcttgtagataagatgcttttcatctgtgagtctgtggggaagctaggccttcatagcaaagtaatgttttaaacaatgaaagcaaaaccaaaaggtaccacgggagcttagtacagatgctcccctacttatgatgggttatggcccaagaacttcttaagttgaaagtgcattgaggccgggctcggtggctcacgcctataatcctagcactttggaaggctgaggcgggtggatcacctgaggccaggagttcgagaccagcctggccaacatggtgaaaccttgtctctactaaaaatacaaaaattagtcgggcatggtggcgggcgcctctaagcccaactactcgggagactgaggcaggagaatcgcttgaacctgggaagcggatgttgcagtgaaccgagatcgcatcattgcactccagtctgggtgaccagagtgaaactccgtctcaaaaaaaaaaaaagtgcattgaacacaggtaacctactgagtgtcacagctgagcctagcctgccttacacatgctcagaatacctaccttcctctgctgctgggcaaacccatctcacacaaagcctactgaggataaagtgttgaatatcttacatgattcattgaacactgaactgaaagtgagtaacagaatggttgcatgggtacttgaagttcagtttctatttaatgcgtgttgcttctgcactgtaaagtcaaaccatcataagttgggggccgtctatactgtggtcatcctgcatgtgaacttggacaagtatagcaactctactcagacgtcttctggaattattaggaaattaacatgtaatttaaacagtatttgtggcttttccctggtagtgggcatttagctataggtgtttttaaaactgacatttaagcaaacaaatcagtaagaaaaaaaaacacaatcctatcaaaaagtgggctaaggacatgaatagacaattctcaaaagaagatatacaaatgaccaacagacatatgaaaaaatgctcaacatcactaatgatcagggaaatgcatatcaaaaccacaatgcaataccaccttcctcctgcaagaatggccataaccaaaaaatcaataaacagtagatgttggtgtggatgcagtgaacagggaacacttcttcgctgctgatgggaatgtaaactagtacagccactatagaaaacagtgtggagatttgttaaagaactaaaagtagaaataccatatgatccggcaatcccactactgggtatttacctagaggaaaagatgtcattatacgaaaaatatacttgcacatgcatgtttatagcagcacaattcacagctataaaattgtggaacaaacccaaatgcttatcaatcaatgagaggataaggaaactgtggtacatacatatgatggaatactacacagccataaaaaggaatgaattaacagcatttgcagtgacccggatgagactggagactattcttccaagttaagtaactcaggaatggaaaacccaaccatatgttctcactaatatgtgggagctaagctatgaggatgcagaggcataagaaagatacaatggactttggggacttgaggggaggagaaggaggggggcgagggataaaagattaacaaatatggtgcagtgtatactgctcaggtgatatgtcaccaaaatctcacaaatcaccactaaagaacttattcatgtaactaaataccacctgtaccccaataaatggaaaaaaatcataaaaaagttagctcagaaaaaaaaccttgacatttaaattcttttattttatagatgagtgcatgtgtgagagagtgtggtggtgggacggcttagtttcttaaggcactgcaacttttgttacataaatagcatatgtagaaaagaaaagaaaatgaagataagcagaatggcaacgaataaccccagggcccacagcaaactgtaaggcaaccttttcccccagtgctgagtaccttcatttcagctttggacatcctcaacagaatacaatttactgctttaaagtgaaaaaatgcagagatgaggctcacatcttacagataaggaaaccaaggcctagagaaggtaagcaattggtccacagcccccagcagccagtggcagcaccaaagcctgagcctggcctctgaaatgccctgtgggttttctcctggcccgtcactgcagccttctcgctgatcttcttaccatcgcttcccctttccagttgctttttcactgaacgaccaggttggcgtttctggtgcaaaatataacctatttaaaaaaattaccaagggtgcctagactagcattgtcctttttctgaatttccttttactaatctgatactttctatcccataagactgcttctcagcctttgccccgtccccaccgccatccttctctacattttgtgctgatttttctgtaatgaaccgacccagacttcaaggtgcagttcagacaacacttcctcctccaggagtccggtcaggacatgcccattacctaccccaccccatgatctttcttccctataacccaccccccacatcaaacagttactacttcaaacatacgtctctgtggcattcgtcacattcttcctgttgctttaactgtgggtttcaagctctgattcttctcatgagattaatttttttagggcagggactgtgtttcagctgctcagcacaggcagcaagcactcagccaatatctgtggaataataatgcataatctggaaatctctacaagtgatttatattataggtaaacattttattttgatgatgggcatccaaaacactgcctttgaatcttctgaaacttggaagaacttctccaaaaaggagcataaggaacttggaatgttttactatacatgaccttgctgccatcttcctttctggggttgcccagcaaacatcactgtaactcatgacagacaggtgtcagctcattgagtgttcctgtaacaacctgaacctaacagcagtcgtataaatttggaagggcaacagttcagagagctcttctctacaagtctcctccacaactcttctccttttttcacatctccctcattctccacagtccaggtcccaggtggggtgctccatctcccctggagccttctcagtggcctccaggcaccagtgtgcaccgcacctgcagctgggtctcctccggggcgtgagctcctggtggtcagggaccccttctcacaccgtgtcccacttcacacagctccttgctctgggctctccgtcagtgcctctgagttgaagctttatgaagaaagctctagaatgagctgactgaggctgacaataccagagggagtgagccagtgaaggcgggattgcaccacaatgcgtgctcacatcaggaaatccatgaagagtgaaaacagggagcgaagaattggtggtgaatctcagtcgatgcaggctgaagtgcttagggaagttggagttgctgtctgttccctgatccttaggaagcgtttggaggtgtgtctttcgtcttttagagctgcttgctctataattttgggttttgaagggctcttggctgggagaactcagtctgacattttcatatttttaaactccattaagggaattttacttaagctgtttctagataagccctgagtgaaaaggtgtctccaaccttctcaaattctcatacttcctgagggcctagacatgatgtgcttgtggaagagtgaattcctagatcaaaccattcatggagaaagctacggggactcaggaagtgggtttcccaagggtgttgccaacattcactatctgacgtagatcccagagcacacgacatccacaccacagcagctgaagatgtggctgcattctttttcgcgttctcaccctttgagaatgacaccatcagcgctcacataatctactttgttagagatatgaactcaatctaaggtttcccctgtcatccttctcccgtttctgaatccatcctgccagtccctgtctcatggtgttttctagctcatcctacgagaccatttagggttggagcattaaggacagtcactgggtcacaagactgggtgctgctagacgggttttggaggaaacagcctccatgtgtcaggcaaaccaactggcttccacatttaatggaatcattatacacagaaccccaaaatttgtgtaacaaaagtgtgattgccatgaacactttgagggagaatgtgttcacaatgtattacatagcacaaatgtcgtcagcaccgtcttccggtcaaatggtcaacaccttgaggtcaaggggctgatttctaggaacacggagcacagacagtccagaacacaacagtgtctgttaacgattgcaagagcaccttctcttcaggagaggaaccaccctgtcactcgcagagatgaacatggaaaggagcttctgtggaacaggaacgcacatgaacacactgggaaggcactggactttgtgttgatagagttcttaacagtcttacacagaacggtgtgggtccctcccacagctactttttggcgtggagccttccggcaagtcaggccatctgactgagccccacgggtgcaccccttcgtaacctggtcatcacagctcacaggggagagccagagtctatgttcccaaggaggttttgaggggtgatgcgtgaatatgggagacacagtagaaggtgtgtgcccggggatggggtgcgggacggtctcagtgtttcagtagaggaagagggtactggaaagactcctgagttccctcccacgctctgtggctgcactgcggttctggggagactcttatcctcttgtttaaggaaatacaacatgtccactctcttctgttcacttcttttttgaagagggaaatatttcatggcctgtcttcaggagaggaaatcctaggaaatgcctgtttaagagactatgtgacactaaactgctagttaacaaggacaatttctccggtgggaagagcacaccagcatcccgtgtgcatctgatgcaggacccgctcacacgaaacatgctcgccttcctgttggcaccaggaggaagtgcagctgccacctctgagtactggggtagtgcatctggagacttgtaaagggtccagatgtggttccatgtgaatcccgtccacaggcactgggatcctgggtcagccaatgctgattcacctgttcctgcagaccctgctgccaaagacaccgcagaacccatggggaggcagaagaaaggctggagcaggtcagtgctatttcagctccattcagagtcacagaaattaggttattttggcatctatctgttggctgtaacaatgaagaagtgagatactgagaggtgcaagatgatttattattattattaaaaataataatgagaataaactcccaccatgcaatactaaaactcctaaggagtcctaaggactcctaaaactcagtggactatttaaaaatgagcaaaagccggtccatctggcattatttctcatcaatcaaaccactcgtgcagtggaaagtgagtccccacggatgactggaggcgcccatcatcactccgtgggtcttcggatatgggacgagtggaaactgtcctggtgaaacttcgttcctacaacgatgctgccagcagtggagacttcttcccactgtagaacaaggcgtgttaaagaaagctgggctttggggaacccagtcattactgggaaggctatacttctcttttctacaatggcgcctattgcagcacaatgccctttaatttactgaacattacaatcaaaccttttgttaaaacgaataatagaatccctttacattttccttcttgtgacgagaccacaggtttgtgtgttgaagtcacaagttagagtaatgcttttaaaagcaaggactaagctgcttccactgccacttggggaaatgatgaccttttctttctttaaaaataaacacagtcacctgtcttcattaatacatgaacgggaaatattcatgttaaatttttgaattccaaaagtaggacaattgaattccaagcaaaactgtgaaaagatgaaaggagaagttcgatgaggttgattgtcctggctcagcacacacagctatgggggcttcgggagcagcaaacccttgatgagaaggtattttattgtctgtagattgctgcatctggcatattttaaatattatttgttaatattatgcagcaggaatgttaaaatatttaaaattagaaattcaaagtagtacatgtgaacacaaagaagaacagataatggttaaaggatcagaagatagtttcactatttcttagtttaagaaagctcttcctgaaacaggaatcccgacccatacgaccatattcaacttgccatctcactctcagaaagcaatgcccacaacgtgaggcggcagggagtgaaccggcttcttcaccatcccgctcctctaacacaccgtgtgcccgtcacggcagcacctttgacttgccatggaattacgggtcttactcaacagctgaaacaggcattgttccggctctccaaacaagcaacttgagatgcagggcagatatgcacacattaccaaaaggcacaggcccatggcagccaactcgaagtgtgcctgcatgccagggtggagtttgctcgggagaagcaaacacacggttttggaattcagcctctgggtcatccgtacaaagccaaaaagaagtagaaatgggacccaaggaattaacaagagtgtgtgaaagaccattcatggggtcttctcgcttttgatcacattttaaaaactgctttcctgacaacttgtttgtaaggaggaggcattcccacacgtatctgcagtaagtcatatgcttcccttaccgcagggaactgggaagtggtcaacacagatgaaactggcaaaagcctcctcctgtgggcaccacaactggcttccctgatggatgtgaattaatgccatttattccaagctctttctctgagagttttgtctccagctgacctattctgaggaccacctagaatctctggcaagcccagagacccttgaaaactgttctccctgcgtcttaatgtgacttagaaatccatttccattctttgccttgttaccaatcaaactgtggagtaacagaaaattataaaccattaaggtagtggagaaaagttcaaatacttcaaaatggaatcttccggagaaagtccccagttggtatgcagttcgggtggagaaggtgaagtagcagcggcaggaacaaagcgtagaaggggaaacaacgtgtggtgcgtgttggttttgagaccgggaacgctactgaactatctgctttatttaaaactttttcatcattgaaaaataaattcactcactgagaattaagaatcccagcactttgggaggctgaggcgggcggatcacgaggtcaggagatcgagaccatcctggctaacacggtgaaaccctgtctctactaaaaatacaaaaaattagccaggcgtggtggcgggcgcctgtaatcccagcactttgggaggccgaggcgggtggatcacgaggtcaggagatcgagtccatcctggctaacacggtgaaaccccgtctctgctaaaaatacaaaaaattagccaggcgtggtggtgggcacctgtagtcccagctacacaggaggctgaggcaggagaacggcgtgaacccgggaggcggagcttgcagtgagccgagattgtgccactgcactccagcctgggcgacagagcgagactccgtctcaaaaaaaaaaaaaaaaagagagaattaagaatgcccttcagataaggctgtcaagaaaatgacatgcttttttcaaagtcctgttagaaaaacactgtaagaggacagattccttgcctctaatagaggcactgggacatgatcacagaccttacgtactttccgaagagcaaagggaaaggaaggttaactctttgcaaagtggtgtgttaagaggacatgaaaactggctctatcttgattgagtagaaactttaattagtgtatttttattataatttggcttttgatgttccaaatcgataacaaagtccagagttgtaagaaatcacactgacaaaggagttcttacacaatgcccaggtgacctgcagggtacttcctggagtccacagccggcccagtctctgcctcacctctagaaggactgcatgaagacctgcgatgcgtggaaaggtggcctggtgcaccaacgcctggtgatcctcgatttcagtttatgacttccactaaacttctgttacacatttacagaaaaatatgacaatttgataaagacttaacaacaaaaaccccaatggaagatgttaatagtgaacacattgtgttctagaaatgttctaattaataaacttaaaaagataagtaattttttccttaccacctactcttactaagtaggggaaagtcttgttctttcatacgattgatggattgttttacgttgggcattttttagcaagatatcatattagggagtgtgcgtaggagggggtgacaggggtcacctgcagaaagactaagaaagaagctgtttaataatggggatgatgacagaggcatcactttgtatttcaggctgtcattctcagagaagcgcaaagaattttaaatgaacaattttatgaatcttattatcttatttaacatcttaaaaattaaggttatgtgaacataggtaaaatacagagatgaatgcttataagcaatggaaaataattcagagaattatactatgttttccataaatgtacagctattaatatttaaatttagggcaaaagaggtctgcttggcattctaagtgaaatgtgaatgcctcatctggttttgggacagagggctaagagctgctgtcatttctgtcggattcctgccgatgttgtggtggtctagtcatctgtcccttcagtcatccagtttgattaagcacgtcctataagccagggatgacctaggttcgggagcacagtagttagctggccaaagaccctgtcctcatgtggctcatttctttagtttcttttcttttcttttttttttttttgagacagagtctcactctgttgcccaggctggagtgcagtggtatgatctcagctcactgtaacctccacctcctgggttcaagcaatcctcctgcctcagcctcccaagtagctaggactacaggtgcaaaccatcatacgaaaacgaaatttttgtatttttagtagagacagggttttaccatgttggccgggctgggctcaaactcctgacctcgggtgatctgcctgccttggcctcccacagtactgggattataggcatgagctacaacgcctggcctcattaatttctttagctggagggcagaccatctgcaagtagataaacacagctttaaaaagtgatttcagacaacagtgagtagtaagaagatgcggacaagagtcacgacgcagagcctgggtgtggggacggggtgcacctgggatggcactgagggggcccctctgaagggtaaactctcagagccatgggccgagtccccgatgctaaggacctgggcagggcctgagtgggggtggggtcctacagggaagggcagtgaaggctggagcccagggcaggagggcgtggccactccgggaggagggaaggtcggggctgcagagaaggaatggatgtgagggcaacggtgtccggcagaccaggagctgttggcctgcaaggactcagcagtttattttaagagccacgggaagctttcatgagttttaagccaaagatgcttgtgatggtggttgatggtggcgcttttggaagaccaccctggttcccaggtggcagtgcaggatgcaagtcaggactgctgcagcccaccatggaagagcaggcagtggctgtggcatggggaacagcgcgtggggaacagcagtggaggcgggcgaatgagagaactgggcagggtgcaccgcgtcctgcaggcaacacgtcctaggattcccgtctgctcatctgacctgcccttcctcacacacctaagttgtcttcagctctttagcttgcaaaatattttgtcattgtttaaactcttcacccctcacagaaccacagcaaggaaagaccctaatgatttgatctgagaagcaaggtcatacctacccttaagttacctgaagttaacagtctggataaaaacctgaaaaattctatccacaactctgatatttccaatagccttcatgcttttgttacatgggcaagacattcagatattgaatggcactattcagctttcgtcaaagtaagtttgctcaaagtaccatagaaaattaactgcccatagctaaaccccaaatttaaaatgtaaagacaaccgaatcactaacctaacctgggacgccgtgatgtgcttgtccacagatgaggcaactcctgaaacacagaccaaggcatccgggtgcctgtgtgcacacagggctgcgttgtcaatgcatcgcgaccgggcatggtcctgggagtgaattatcccccacaggtcagaggggccgtacgacctcttccagaccccccgggctccagttattaaatgactcctgcaatcatgaactgctttccaaagaacacaaaacaattctgtgaaagattcacaggctgacgtaggctgacaggggttctagcccattaaatccatttcaaactgaaaccagggagacagcaagtttgagaaaaccagaatttttaagagatgaaaactgcacatctgcagtggacgtggtcacctgcctgttgtccttggacaccgcgtgtgggaggagcccagaactttctaaagaacctaacaggcctccaggtcccagatgttctgaccagccagcatgtctcgagtgtgacgttaagtccagaacacacgtgaaggacggcacactggtccatctccctggacgtcctttctcctgtccacagcgacacgggctctaaccagccaacgccacgtatattgagtcagtgccattggttcagtgggaagaatcatgaggacaaagatgtaaatggcaggtgtgcgttaggcactccccataagctaactgtttgctcttcatggtgtctctaacgtctgacatagcctggtacaccctacatgatcagtaaccatgtgttggatgaactcagggtacaggcacccacggaatttcattgtgggaatgtgggagtgcctcccagtttctgatcaaaggcctcttgtgtccaaggctggtcatgtgtgccaggcacatgggtttcaggtaacagtcaccttcactttggaagtgcaggtgcaatgtactgagccacggcagtgctgccatgaaggcgtttcggacaaatggttaccagtgtttcatggaatgattttcttcaccaatatttgtcattcaccatctaaaatcaagtgaacaatcagagggggagaagggtacagatctgggacaataaaccaattttcatttttctagaattttctcctatattttattgtcttcgcctcagctcttttctctggctagcttacagactctcaccccagccaggatatctggattttctagaattttctcctatattttattttcttagccttagctgttttctctggctagcttacagactctcaccccagccaggatatttggattttctataattttctcctatattttattttcttagcctcagctctttcctctggctagcttacagtctctcaccccagccaggacatttggaactattgcataatccattcccagaatgcatgagcagctctggaccctataaaatattcattcactttcaaaaatatttgcaccctgctgtcaaatgtagacaaagtcacatgaagtatcaggaaatcgctattttaatggcaaatacttccccaaccctctctttccactaaaacattttcttcaaaattattttcataagaaagattaacaatttcaacattagctgctaatcccctttcatttaaaactctgctgataaaattctttgcttgtcattcaaacagtaagtaataattatagatttgaggcttccatctctggcttcattaatggtaaattgcatggaagtctgaagcataagtcagctttgatacatctcaaaatgcaatttccatagcttcccttggctatgtacaattaattacacagttaataagggaaatatgttaatgaaaggaacattattcatcaagaccacctgcctttaccaaatatcctttgtgtgtttctcttcttcttgtaattttggtctacagacagttaaaaaaaacaacaacaacaattgacagtgtgatgattttaataccagactgcagctacttcgattaaaacaagtctaatgaaaaattaattcagtcttataatatttctactgatttctgccttttagaagtttaaaatgtctacccatatatttctactgatttctgccttttagaagtttcaaatatttacccatggtatttcaaattcctgaaatggctatttatcaaacacaaagtttactattcaggtgtcttctttataccaggatctgcggtcatcacctttatagatgaatggaaaacactggagaactttggagaaatggcgtggaagatgaagagataatgctcaatcattctaaacagattaaactcccccaattcttttcccgtccattttaaacctctctgcttagcaataattaaatcctctcattccatttggataatcaaagtttaactatagatagtttaacacagaaaccaatgctaacctttacaaagaaagtaaatatcttctaagcctttgatgaggaagagaaatcggaatattataaccagaaaaaggaagttggaaaaaactatatttctgtttactttttataacttatttgaacaatatgaacaaatgtatttgcaaatatttgttctacaacatttttttattaatataaatcaatacacattccttattcaatgagaaaagaatttgactctagcttcgaacatatccctttgacatatgaaatatagtttaagccatgagttacttaaaaattccattagtgtgcaaaattcagctgaaaaccaaccttggattccaaacagatcataggaaaagagggtgcaagagaaagaaaacagttcatgaaatgcaacctttacgtaactaagccctgaagaggtctcctaccacactaacatattctaggagaagagcagaatctctaaagtgaacagcagcccctgtcatcccagctctgtgacaagcagccctgggtgggggaatcggggtggctcagcagcaacatccacaccagcctccagcagcctggggagtggcggtttccgtaagatcccttcaaaagccgtttcgtatcacgatttctatgctttgtgtggcagcagacccatttgtttaagtggtcatgcacccacctctccccaccctgatggtcacctacaaagcccatatggccaaaacggtatgatcagattctctcagagaccagactcctttgctggcacccgacccaggagaagcagcccagaggggaccatttttactccactgatgacgacagtggttctaacagggagacctttcagaagaaggatgaggaggggcggttgccaggcaacgcatagacagcttctcccgctcccaagtagcaggtcttttcttagcagcagcattctctattctgtgccaacgatgtactcattacgattttctgatgaagtttttaggaagaataaagagttccagcaagtgctgtaaaggttacttaggacagtgatggagacatgcatgtcttcttccataagcagaggagaaacactgaattctatagcaccttatttgaaaatgccgaagttctaaaggtgctcactgaaagtagaatgttttgatgcttcacttcctaaaacccacaggctatatgcacatgagcaataatacaagaaaaggggaacaaaacaactgacaaggtgatggcaccaaaaataccagaaagacttgcttgtctgagacaaagttaatatccagctcttcaccaaccaaacgtgatcacaaggaatggatcttgaaggggtcagtctatgtgcgagacaaagttattgtccagctcttcaccaaccaaacgtgctcacaaggaacggagcttggaggggtcagtctatgtgcgagacaaagttaatatccagctcttcaccaaccaaacgtgctcacaaggaactgagcctggagggctcagtctacctcctccaccttccagaccttcctgtgagcagtgaaatttctaaaatgttggtgaagggaagagaacattcaggcttccatagtcaaccacaattaccaagtgttgactggtcaccactcctcttccaattgctttgaaacgaggagtttggaggagaagagaacagagagctgatatgtcaaacagtgttttcacttttcagggtgaagagttagaggtgagactatcagagatattttacatcttttcccagctcagtgccagtcacacggcatggggaccaaatgacatgcccgctggcattcccagggtttggagggtgaggtgggagtggatgatcggggtcactcttcttgctgggacttctcatctgtccctccctgcagctgccttgtcgtcactcagccacgtggaccacctggacttccctaaggccatcagcattagccgtcagggcccactcgctgctcacctgctgcagaccttggcccatcagcactcccagaggcagagcattctggacacagcgatccctttgactgcttacagaaaggtgagtgtggaaacccggcggaatgtgatcattacctgctcatctttgactctagacagccatcggtaggatgtctttctttccttctttctttctttttttttttttgacagagtcttgctctgtggcccatgctggagtgcagtggtgtgatctcggctcactgcaacctctgcctcctgggttcaagtgattctcctgcctcagcctcctgagtagctgggattataggcatgcgccaccaaatctagctaagttttgtatttctggtagagatggggtttcgcctgttggccaggctggtcttgaactcctgacctcaagtgatctgcccgccttggcctcccaaagtgttggggttacaggtgtaagccactgtgcccagctatctttctttattagggagaacacacagttggttcttggaggcaattgtcaatgtgatgtgagatgaagcacagtgcggcctctgcactgttttcctttgtgtaatttgcatggcatgtgtgtttccagtgatatgaagaaggagataacctgaagtgtcttcctccacagacacgtagaatgctggacaaatggcacagtcagcctttcacagaattaagggaaatccccaggaatccaagctgaaggagaaagtgaaactggaatgggggatgtgcggcctgaagccgctcaagccctgggtggaaggcaggcgacaggattccctacatctaaaatcagggtcttggactttgctgcccatgtggggccagcagggaaaaccctgccttgctggaggtagagagctggacccgagccccccacataacacaggaccctcaacaaccacacccttagcaaatgggtgtgctcacaccacaggaatctcgtctgtcaccatatggactcaaaatgggaagacgcttgaaacatgggcctcatccagaattgaggctcaaacacatgagtgatctgggtgaggaattgacatgaagatagtctcagtttaatgacagcctagtgtgtctggcaaaagctctcttgaggttaatactctcagaacagggccatacaaaactagaactaaagccccaccaatgaggagcttataatctggaattatagaacccaccagacaacaaactaccatgagcaaatcagcaaacatcaaagagcaggcttagacccatgagaccttaataaacgtgttagaaaccatcggataatgcattgatcatgattgaaggtgttaaagtaggaaccaacaatttaagaaaagaacaacccagcaggttgatctgaaaaagaacaaaatagaacttcaagtgaaaaccatactctttaacattataactacaatgcatggattacaggttagacactgctgaagagaaacactgtatgttggaagacagatctgaggaaattccctggaatgcaggacagaaagatagagaaaataggaaagggatttaagggacatgggaataagaaggtacaacttatttccattagaggggagaatggaagagagtcaaatgtaaattatatatggtttataattttttaggattagctggagaaaggaattctcagattcaggaatcacagtaagtttggagcaaaaattaaaaataaaataagtccttaccaagacaggacacaaggaaactccaaaacagtaaaggttaatcaggaaggagcggcccacaaaggaaccaccatcagacatagcgatcaggaaggagctagagctggcacacaaaggaaccaccatccgaccagcaacagacagtcttctcaagtgcaggggcaccagagacaagagaacagggtttcaaggtaataaaagaaaaagaaatagaacttgacccttggctaatctgttatgcaagtgtgaggatcaaagacattttcagacaaagagaaggaaactttcccaataaaagactgaaagaaggatatctttcagaaaaaaggtagttttacccaaaatgaagaattgagcagtaaaaggaatggtgatggggggagaggggaacctcataaaatgagagtcggtctgaacaaatgctgactatgaaagctagtaaaacaaacggttgatttcaggatacaaagacaaggcacaactgaaatactgaacaatactgtatgtgtcagagggaggtagctgaggtctgtgtctcaggtcctgggtttatttgtgaggagggcagaaatgtgaactccagatattgttaagccaagcatggttattaaaagtatcaggataattactaaagtataactgctgaactagccaagggggagagagggaataaagaaaacccattcattcccacagaaggcaggagaggatgctgcaacaaaatacaactcagaaaatgcagggcatatgtaaggcaaagaatgagatgtacacaggccaaacactgagtgagtgagagattagcttttttaaagaaaaacttacttggcaacatggtttctataattttagaaacgtcactgcaatactctgcagtatgttaggagattttcccacagtgggcgtcattatttttctttacggcagtatggttgcatgagttttgtaaccagccatattttgtggaaggggaagccagagttcacaggatgtaatgctggcccagatgtcacactgggaagccagactctggacgtggcaccatcttttcactgcagcaccaaatcttcctgtctttccaagatcactgtcctcttgctccagaagagaaaacactagtgacaagtcaggacccactcagtccctggctcatgcatcctaagtgctcccaccttctgcaaacgtacacaaataagtgaataatgtcgacttttcgggttcaagaagtcacaacaattacatgtggagtcaagcaccactccacatgtggacgcacaaagctacctgacgtctggctcaaggtgttcactcgagtccaggctgagctcatcttctgctccttccaccgtgaactccaattctgtgaactgccctctgcttcctgatggagctgtgctgttccctcctctgcatgccacctgcccaacacagctgtcttcaccgaccaaaacctggtctcaaatgtccacctcaagtctcctctgtagcccccctgccacgcccgacactcccgtcaaggacagagacgtcttctagcaaaagaatgcagcttggtgtgtggcaatgtctagtgtttctccagcccttcacccccttttgccccaaattggctgtaagcctcttaggagccagactgctggcctccttcacacccagcatccccatggtcctctgcccaggagccgtgctgaggacatgaaggtaagcagagcccacctgacgccagctcatttctgaactgcttgtggaatttcaaaagctgcattttattaaactcgtgttaggtttacacatttacacaaagaatcagataactccatccaggccctgaactgctgtgattcaattcctctgatgctgtctataaacctgcagatgcaggagtcactggacagaccagatggaggcggcctctggtctcgcctcctcgcctcgggtttctccaggaagtttccatgagttcccgagcagcctgtggacgtctccgtccgtcactgggtgctcagaaaacgctgcacgaatgagcactttccagacctgactttatgcaccagcttcaagtgtttcctcccacaaccgttaattcgtggacctgttaacttttaccaagtttaatgtttggttacccaatttaattcaacaagtatgagttggatgcttgattccacttcttctatcatgccccattcacacactataagaagggtctaccaagtcaagaaacagcaaaaaaaaaaaaaaaaaaaaaaaaaaaaaagcagctaaaacgcagggctgcgggacagtgggtgccatttacctaagccaatcgccccggcagccaaaggccaagctgcatcacagcagcttacctctttctcccgcagactctctggaccatcacccaccttctctggagcccaaacatccaatcaaaccaggtcgtaaatatacaggtagtccccgcttatgatggggctatggcaggataaacctctttggagttgaaaatatcattaagtcaaaaatgcactttcaacttacgatgggtttgttgggacataacccaccatctgtcatactaaagatggtacaaactcttcctatagactcagccacttgtctcgctggggccagcatggcagcagggactggtcagattggggtcagagaatttttcctttaaacattaagtgctcaaggcagaaaagacaacatattgaaaacttggagagactgaaaaataaagcactagcatggctctagcattttaagcagcaaatcagatttttaaaaaataaaaagtcaaatcactccccctcccacaaaaaaatagagttccacaccctcaataaaggcggatcatggaagggacactctctgcctgtgtcacaacccaactatccacagagcgctgcaaggggcactgtggcggaggtgtgggggctgcaggggaaggccgtgatggccgctgaccaaggcacagctgctgcaggacgggcacacccacggcccgggcatcccagggaaatccagaaccagtggctgtgactgctcccccgacggagcccctgttccttgcacagccgctgctgcctccagcctctgtctgcgcccttcccaaggaccccctgcagacacccgcacccacagtaaaggaggtgggagcaggcggccaggctccagccaggaagtgtgagctgagctctagaaagtggtggtgtctaaagtggctcaccagcctctccgtcaggcctcgaaggttcgtcaccaactcgtgcagcagatagacggcagtccgggctgtggcaggtgacagcccagggcccagacaccggccagcctcatagtgctcgccgcacgctcagctcaccagtgcggggagactggagcttcccccgtgggactgtggctggaagaccaggggcctctcatgcgctacaagctaccagaaaacactggtgtgcatcaggcgtcggtccctgttacgggctgaaccattccctagaatccatgtgctgcctccctaatcccctccaggttaccccgcaacataacctcatttgcaggtggggcctttacagagatgatggagttaaaatgaggccactggggttggccccagaccaatctgagtgaggtcctgagaagacagagcaggatgtgctcccacagacgaaaggttctgggaggacacaggaaaaagatgtcatctgccagccacggagagagacctcaggaggaacaagccctgcctgcattgtagacttctggcctccgaaactgtgaggaagacactgctgtggtttcagctgcccagcctgagggatgtcgtcacggcagccccagcaggccagggcaggcccctggaggtccacagacctcacatagccagcatacgcctctcccaggagccccattcttgcttcatcaattaaagcagcactctggctgggcgcggtggctcatgcctgtaatcccagcactttgggaggctgaggcaggcggatcacgaggtcaggagtttgagatcagcctgaccaacatggagaaaccccgactctactaaaaatacaaaattagccaggcgtggtggctaacgcctataattccagttactcggaaggctgaggcaggagaatcacttgaacccgagaggcagaggttgcagtgagccgagatcacaccattgcactccagcctgggcaacaagagtgaaactccatctcaaaaaacaaaaaaaaaaaaacaaaaaacaaaagaaaacaaaacaaaagcagcagcactgtctgctctgagctacaatcctatgcacgatttccacccgtgggaaccacacgggcccgagctacccagccggctcctttctcacctggtcacatacatctggacaggacaagaactctcagagggctttctctttctccttggtcttcctaaactttgccctaattaatcgatatcactgcctctctcagaggtgactgtggctgtgatgacggacacggaggagacgaacaggagcagaacagtttcactgccacgtccatttccgtgacagcacctgtgattgatgttgcgtggacgtgccacacttgcacttggcaggctttcgaggctgctggccttgctgccatgaggactgtgtccaaaaccactcttggaaggaaccataaacggctcccaaacatgagaaagtatgctcagtctcacgcaagccagagaaacagaagtgaaaaccacttggatgcagcccttcccacctaccagcggcaaagttcaaaggttcgctgatacctgaggctgggagacctgggacagaggtaccatgtctatggcactagggggacgccatcttggcaaagattattgcagggaatgtggcagtatctatcaaaataaacaataagcatccgcgatgactcaggatctggcttctaaaaactcacatttcacatggtccgtgtagtctggagtggcaaaagtttgaaattgcctacattgcccttactaggagacagtaaatttctgtgcgtccaataacaggagaacatatggctgttaggagggtggggccgggctgtacacactcatgcagggccctctcctgagagcggcgtcatgtgaggagctgctgtttacgcaccacatgaccacagcagcaccggctggccctggggagggggctgggccccagagtcccggtgtgggtgggcacccctgccgtggttaccttccccacaatgatgccgagtggctgtaatgtcttcatgaagcacgtcccagaccaaaccagcccgggacttgcttgctgggacacagtcccaccccttggtacaatatgacaaagaaaaccacgagtttagagcttaggtcactgtaaagctgcttttgaaaaaggtgcaagacgtaagggctaaaatctttcagtttagagattagcagatgaagggcctcctttcagggaagagagtggagcctgtaccccaaaaccccaaagtagcagaaccagggatcctgctgatcactgactgaatgccaactgtttgccaggcacacagtaggcgctgcctccgcatggccttgtgatgtggtttggatctgtgtcctggccagtctcatgttgaaatgtagccccagggctggaggtggggcctggtgggaagtggctgggtcacagggtggtttctcatgggtggtttagaccatccccttggcgctgtcctcaggatagtgagcaggctttcctgagatggtgttgttaaaagtgtgcggcactccccatctgttctctccctcctgcacctgccatgtgacgtcttggctcccctttgccttccgccatgactggatacttcctgaggcctccccaggagcagaggccaccatgcttcctgtacagcctacagaaccctgagccaattcaacctcttttctttatgaattacccagcctcaggtatttctgtatagcagtgtgacaacagcctaacacacctgtctaatgaacccgggtctaattaacagcccatgtcctcccacccaggggaggcccttgcacaggggaggctgggtcccactggtaccgggccctgtgagagtctcaggtacagaacagagtcccaggagcgtcaagcaggagctgtggcttgggtggctgcatggacacgggaggctctagaacgtcccctcaagcaagttagggtgtgaggacggatacttgggtctgcaccgggcccaaaggccatggcagccactgggaggtcagacccatccagcgtgcaccgaactcagtgggtcggacccattcactgtgcaccgaactcggtgggtcagacccatccagtgtgcactgaactcggtgggtcagacccatccagggtgcactgaactcggtgggttggacccattcactgtgcactgaactcggtgggtcggacccattcactgtgcactgaactcggtgggtcggacccatccagcgtgcactgaactcggtgggtcggacccattcactgtgcactgaactcggtgggtcagacccatccagcatgcactgaacttggtgggtcggacccattcactgtgcactgaactcggtgggtcagacccatccagcatgcactgaacttggtgggtcggacccattcactgtgcactgaactcggtgggtcagacccatccagcgtgcactgaactcggtgggtcagacccatgcagcgtgcactgaactcggtgggtcagacccatccagtgtgcactgaactcggtgggtcggacccattcgctgtgcactgaactcggtgggtcggacccatccagcgtgcactgaactcggtgggtcggacccattcgctgtgcactgaactcggtgggtcggacccatccagcgtgcactgaactcggtgggttggacccattcactgtgcactgaactcggtgggtcggacccatccagcgtgcactgaactcggtgggtcggacccatccagcatgcactgaactcggtgggttggacccatccagcgtgcactgaactcggtgggtcggacccattcactgtgcactgaactcggtgggtcagacccatccagtgtgcactgaactcggtgggtcggacccattcactgtgcactgaactcggtgggtcggacccattcactgtgcactgaactcagtgggtcggacccatccagcgtgcactgaactcggtgggtcggacccattcactgtgcactgaactcggtgggtcagacccatccagcatgcactgaacttggtgggtcggacccattcactgtgcactgaactcggtgggtcagacccatccagcatgcactgaacttggtgggtcggacccattcactgtgcactgaactcggtgggtcagacccatccagcgtgcactgaactcggtgggtcagacccatgcagcgtgcactgaactcggtgggtcagacccatccagtgtgcactgaactcggtgggtcggacccattcgctgtgcactgaactcggtgggtcagacccatccagcgtgcactgaactcggtgggtcggacccattcgctgtgcactgaactcggtgggtcggacccatccagcgtgcactgaactcggtgggttggacccattcactgtgcactgaactcggtgggtcggacccatccagcgtgcactgaactcggtgggtcggacccatccagcatgcactgaactcggtgggttggacccatccagcgtgcactgaactcggtgggtcggacccattcactgtgcactgaactcggtgggtcagacccatccagtgtgcactgaactcggtgggtcggacccattcactgtgcactgaactcggtgggtcggacccattcactgtgcactgaactcggtgggtcggacccatccagcgtgcactgaactcggtgggtcggacccatccagcgtgcactgaactcggtgggtcagaccctttcactgtgcactgaactcggtgggtcagacccatccagcatgcactgaactcggtgggtcggacccatccagcgtgcactgaactcggtgggttggacccatccagcatgcactgaactcggtgggtcagaccctttcactgtgcactgaactcggtgggtcagacccattcactgtgcactgaactcggtgggtcggacccatccagtgtgcactgaactcggtgggtcggacccattcactgtgcactgaactcggtgggtcagacccatccagcgtgcactgaactcggtgggtcggacccatccagcgtgcactgaactcggtgggtcggacccatccagcgtgcactgaactcggtgggttggaccctttcactgtgcactgaacttggtgggtcagacccatccagtgtgcactgaactcggtgggtcggacccatccactgtgcactgaactcggtgggtcggatccattcactgtgcactgaactcggtgggttggacccatccagcgtgcactgaactcggtgggtcagacccattcactgtgcactgaactcggtgggtcggacccattcactgtgcactgaactcggtgggtcggacccatccagcgtgcactgaactcggtgggtcggacccattcgctgtgcactgaactcggtgggtcagacccatccagcgtgcactgaactcggtgggttggacccattcactgtgcactgaactcggtgggtcggacccatccagcgtgcactgaacttggtgggtcggacccattcactgtgcactgaactcagtgggtcagacccatccagcgtgcactgaactcggtgggtcggacccatccagcgtgcactgaactcggtgggtcagaccctttcactgtgcactgaactcggtgggtcagacccatctagcgtgcactgaactcggtgggtcggacccatccactgtgcactgaactcggtgggtcggacccattcactgtgcactgaactcggtgggtcggacccatccagcgtgcactgaactcggtgggtcggacccattcactgtgcactgaactcggtgggtccgatccattcactgtgcactgaactcggtgggtcggacccatccagcgtgcactgaactcggtgggtcggacccattcactgtgcactgaactcggtgggtcggacccattcactgtgcactgaactcggtgggtcagacccatccagtgtgcactgaacttggtgggtcggacccatccagcgtgcactgaactcggtgggtcggacccattcactgtgcactgaactcggtgggttggacccacccagggtgcactgaactcggtgggtcggacccatccagcgtgcactgaactcggtgggtcggacccatccagtgtgcactgaactcggtgggttggacccatccagcgtgcactgaactcggtgggtcggacccattcactgtgcactgaactcggtggacgcgtaaatggctctcaaaggagctccccaggcccgcaggagtgaggctgggaagtctcggggtctccagagccggctactatggcacctggacgctcctcctctcctggctctgcctcttgccccagctttccccttccctgctggtttaatgccgtctctggtcatggggctccgtgcctggtcctgtgtggcgtgaaggcttcccaaacctgcccgccggagagagacatcccccgcaggggctccccatcagggcagggcacacccccacccgccgtgctgggaaggggggactatgtacccctccatgtgcaggccttgcctatgccacgcagtcctcaatggtgagaaacagctttcctgcaaaaataggctcctccaaatgtgcgccacaaagccggcatcgtccagacagcagcaacggcctgccgtgtctgtgaacgcaggccccacaaagctggagagttcgccctgcggcctggtttactcatcaggcctccgcgccagcacccgagccagagcgagaacggccagcccagccgcgtggccccagagtgaaattctcggtggcccagtgcccctcatcctgggagagcagccatctgtgcccgtcaaccacgtgggaacgatggaatggaatcttccagaaatacagggcactgggtctgaaggtggagggactggggccaggggagcgcctgccaaggccccggcactggtggcgtggggtgcaggggaccccagcccctttctgctgcagctggtgacttgcagccttgggcagggacatctggcatggtttcgcgaggccctcctggttcggtgacttatcgctaagaactaagaagcctggagcctgacaagatcaaacaatgagagacagagatctctcaaggtgcacaggcagagacacgacgggcccagggaagactccaggcaggcaggagggccgaagttcagaggccgtgagccgtgtgggtctgaggaggtcacagcttgtgccggcatctgttggtcgccagcacagacacgcatcacgcgtctcacgctgggagttcagaaaccccacaggcaaatctgcggaaggtgcggcgcgactccacaggctggcagcaccccctccctcctcagcaaaattcatgaactttcctgttttctgtgatcatgggaaatctttggtcacttcctgcaatgcctaacttttcgtttttcacgtctctgtcactgcgcttggttttaatgtcgtcatctgtgaaatgggcctactcacagctcctgtgccctcagtgcctcaggactctccaaggatgagcgaactcaaagatcactgtccatatcctcatcttcaacactcaagaggatggattctgaaaagcacttactcagcacggctttcccaagttaagttctatattatttaagtcgaatggagaagtatgaagccaacttttttcttaacatccccactctccaaaaaacgttctctagcctttaaaggtggacgcggtggctcccggccgactcaggcgtaattagtcacatcgggacggtgacactcttctccacctcctcactcagagccagccaggcagaaatgtcacccttctgaaagcaaagtgatagggaaacagatcttgaaaaaactcgatgattctttatcttacaaaaggatgtgacaggatttcttgagaagccacgtccccgcagatgattaacacgcagccgctttgataaccgtcctgcgaagtcgccttcatcacgtccttgcttttcagagtcccgagccttgctctgagtgagcatctccgtgttgcctttcggccgtttccagagaaatgtaccggtttcttgatggaagtgtttccttcctgcctctccctcctctgagtgctccattcacccgcaggtgagcctcgactcagcttcttccagacagtccaaggcaggggcacggactgcaccttccctgcgcctgggaggcccattttccaggaacaagtgacattctgggctgggttttccctgcaaataaagccctttctccttagttcatcccagaagaaaactggaatttttaaaggacctttctaagaaaatgaaggcaaagcaacacaaaaaccagaatcaaagcccagagacagggatcaggcagagtgtagagaatgcaggcccagaggcccaaaccctaccaagcaaaggccccgccgggctctgttccttcagcacaaccccttcctctccagcccgacgcaccttcggcacaggtgaggtctcaggatgggcggcatctcagatgctcacccggttttaccctcacaggaaccccaggggaaaggcactgccatcaagcccgtctcacaggggagaagaaggttggaggtctgtcctgggacacagcacctgcaacagcaaagcgtctcagctctgacaccttgctgatggagcccagaatctgtgctccacatctagacctgaccacctgctgtcatggcagagcgggggacccagcggctgccccaatgacctgcccacccctgccccttcccatcaggctttcatgtggccccttccccgggggtccctgagacgtgtgctctccctcttgttccacctgctgggacaccttgaccaggtaactaagtccctccctgcagtcctgagacaccagcctcttcctggtgacacccagtggctgcacagccccatggatccccccatcggggcaggcacctgccgcctcctgtctcccagggaagcctccttctctcacaccctggcctgtctcctttataagagtgttgtatgctcccctctctagatggagtgctcatttctagagttctgttactccgggtctccagcacggaatcccagcctctgtgcagaaagcagcagcgtgagctccagtgggtagagtgccccagggcgggagggggctctcggggccaggaggcccttcctgtggggccacagccaggccagccccgcctgaaggtctgggctccggggcagtgtgcagcctccaccctgccacatgtgtcctttgtcacagaaagtctccgctcttggtgctgagcctgccccccagacggtgcagccggcctctcccacctgctggggctcctcacatctagcttggcctccagacatcaccaacctctgctgtttatttcatcggatcgtggggttcagatgccacgttttgtccaacgtgccccaggagtggctgcatgtcaggaacatgtcgctgggaatctctgtggcttatctgaccatcctgccatcctcaggtgaggggcactgaggtggccggttgggtgtctggcggaaacgaggctttgcgcacagagggctgggctgctggatcaccacggaattggctgccttgtagctgtgatgagtcggaaggtcggcgactctgatgcgttcctgcggcaccaacctgcatgtgctttctacagcctgtgtgtgccagggagggtggcggtcagtgccccgagattggctgtagcttccgagcctaaaaggctacctgtgtgagtcctgggaagaggtctacctggagctcacctgtggcgtgagtctgtgcctctctgctcctgtaccagggacatgcccaccaggagaccccgcatggctgagagggcacgggaatgcacttgtaaagtgagctcagaggaaggaaaatcagaactgctgagtgagaggagacgccagggtccaaggcccacgtctggcccacttggttgctggactccacacgatgcccgctgctccccacacccaccccaactgcacacgacgcccgccactccccacacccaccccgactccacacgatgcccgctgatccccacacccaccccaactccacatgacgcccgtctctccccacacccaccccaactgcacacgatgcccgctgctccccacacccaccccgactccacaccatgcccgccgctccccacacccaccccgactccacacgacgcccgcctctccccacacccaccccaactccacacgatgcccgccgctccccacacccaccccgactccacaccatgcccgccgctccccacacccaccccaactccacactgcccgccactccccacacccaccccgactccgcacgatgcccacctctccccacacccaccccaactccacacgacgcctgccgcttcccactcccaccccgactccgcacgatgcccaccactccccacacccaccccaattccacaccatgcccgccgctccccacaccctccccaactccacactgtgcccgccgctccccacacccaccctgactcccaccagcacctgctggcatcgtggagtcagggaaatatctcagtaacattcattttcaaaacagcattggttgatgaggaagatccagtttccctgagtttacaatctgtacgcacagagtctaagtcagccggactcatacttggcctgagtgtgtttctcgtttcggccctgcagttgtgggcggtggtgagacgcgttccgaaacaggaccccgtcacggtgtgtggccctcgatgaccccccaacagggtgtctggagtcaggctttgcagggtttccgccaggtggaggctgagtctgtccttgcggtttaggcattccagcagaagtggtgcttgctgtcagagctgccattacatatgtgaatgccaaacacaattctctgagaaatacagtatttccaggtaccaatagagcttgagatatcatcaaattgttactcaagcaccttgaaatgtggaaatatcagaacacaatgagagctcgctaagcggctctcctcttggctgacctgtcagatgaatgtctttggctgatgggtttggccctaataccaaatctcatcacaaatatgaactcctggtctctgctccttttctaaaagggacaaatgtcaaaacagcctcagaaaagtcagatctaaagtaacaaaaccacagtccatcaagggaggaggttctgccaaagtcgatgacaggtctgccgagtgaactccacgagctgtctgctcccgggt[450 bp omitted]tggtacggcgaagaatgtttccctgacccgtaagtgcagccgctgcttcggccaagcagcgtaacaggctctgccctttcaccccagaggctccgtctccagtgcgggaaacagcacagccaggcacggtcacccaccaggacgacgcctacggcctggagatccaggaggcagccagcaggacgtgctgcgctattgacagctgtcctaataacacccggacattcattatgtatggagtggcaatgcacggccacacacgcgtgatcactccagcgaggaccctggaaaaggccgctgaagccgcgtcgccgtgagcctctggccggcgccaccaggaaggctcctgtgaagagccgagcacccagcccacacctcctcctgccttgctgtcacagcagtgacatttatttacccaaatgacgcttgctggccttgagtgccaaggagacagcagctgcttccgagtcagaggcccaaaacggcagcgcacatggtaggcactaacagacgtgtattccactgaaaactaaatagcgggtgctcactcttacacaccagggactgtgtgtgggggctgcacgttccaggcagaagcacggcaaagatctcaggaagtaaatattcttgtttatctaaattaagaagactccctgcagaaagagccctgcctgtcagcctctgcagcgggcagggtgcagccatcatcgcccagtccccgagggtcagcgggcgcagatgctgggtgttgcaggggccgaggaaggagggccctggtgtttgtgtggcagggagtgcaaagactgggcttaccaggatcatgtggccggtggagatgtccatgttggactgcacaggctcctcggaccaggatgaggcgctgctgcgtgcggaggggctggggatcggcccgtcgctgaactgggatgagacgctgctgatgcgtgacgtgtgcgggccctcaggtcggtctggtggccgcgtggccatacgctggcggcacagctcctgcaggacagggggaggaagagcagggggttagtggcattggggacacccagcaggacgagggccacggcacccacgtggcacaaccccttctcctgctaagatccaaggttcaggcaggcgagagtttaccccagggcaggccagcgcaacatgacggtcaacgcaccccaaagcacgcgcccagcacggtgacccgagaagacttcaggcttgtgcaggaaaagagaggccttgctctcagaatctgagaatacaaacacacatacacacacacatatacacacacacaccacacacacacacacatcacacatatatacacacatacaccacacacaccacacacatcacacatatacacacacacacgccacacacacacaccacacacatcacacatatacacacacatacaccacacacaccacacacatcacacatatacacacacatacgccacacacacaccacacacatcacacatatacacacacatacaccacacacaccacacacgtcacacatatacacacacatacgccacacacacacaccacacacatcacacatatacacacacatacgccacacacacacaccacacacatcacatatacacacacatatgccacacacacaccacacacatcacacatatacacacacatacgccacacacacacaccacacacatcacacatatacacacacatacaccacacacacaccacacacatcacacatatacacacacacaccacacacatcacacatatacacacacatacaccacacacaccacacacatcacacatatacacacacaaacgccacacacacaccacacacatcacacatatacacacacatacgccacacacacacaccacacacatcacacatatacacacacatacaccacacacaccacacacatcacatatacacacacatacaccacacaaaccacacacatcacacatatacacacacaccacacacacaccacacacatcacacatatacacacacatacaccacacacacaccacacacatcacacatatacacacacacaccacacacatcacacatatacacacacatacaccccacacacacaccacacacatcacacatatacacacacatacaccccacacacacaccacacacatcacacatatacacacacatacaccacacacaccacacacatcacacatatacacacacaaacgccacacacaccacacacatcacacatatacacacacatacaccacacacaccacacacatcacacatatacacacacaccacacacacacaccacacacatcacagacacacacacaccacacacatcgcagacacaccacacacacacaccacacacatatgtaacagacacacacacaccacacacacgtcacagacacacacaccacacacacatacacacatcacagacacacacacactgcacacgccacaaacactcactcctatagattcaagaaagcatccactggatcctcctctgtcatcaacgtggaatattctgggataacgccacagtagccttcgttgggtggcttctcattctatcagaatataagccacaggggaggccgggggcggtttgcactgtggactgagatacagaaactggtaccacaatcaaagagtctgcagaaaaaagaagaacctcattctgacgtttctttctctttccaaagcaatgtccaagagcccatgcaagagaaggcaaatggagccgtgcgggagacagaaggcacaggggagggagaaaggcctgtgctgctgagtagacaccaaagcagaagttcccgtatttaaaggaaactctcaacattacaccccaagacagcttctgagggatcactgcagggtcttcgaccctccttccccaggcaaagctcaaccacacacgcggtgggcatcccgagcacctgcccggccgtatgggacccgcctgcaggcaggacacggccacgcagcctcaggtgctcagaacacgccgggaccccgctgctgccgctcaccttcagggtgcagcctgggtgcccccctgacgtctgaccaacaatctcgttttgaaagtgttctaaccactgtgttaggatagcccgtcctattgcctgatgaaaatatacctgtaccctgagtctgcaaagtgaaatgatacccagaaaaagtttataagagaactggagctcaacagaagaggtgaaaatgcattcgtgagaaaaagaaaggctccggggaacctcgtgggctgctgctgccttggtttcattttggtggtgtccgggggaggccaagccacccactcgctccccacagccgtgtgcgtcaaaggccttgcactccccaaggcaatcgccaaagctcaggaaacactccatgtgtcccttctcccttcaccccggggtgccggcttccttgtgtccattctcccttcaccccgggctgccggcttccttggctttaaagatgtctgccaagcccaccggcaccacaccatctagaaaacatttccctccacctggctctctgggatgagcaattcatgctcccgggctctctgcttcggactcatagcgagatacaggtgctgtgggaaggggccctgcggcccccactctccaggagcctgcagcccctgtgagagcagctggggacaaggaggatgaccgcggggactgggaggatgactgcggggacggggggggatgaccccggggactggggggggacgactgcggggatggggggggacgactgtggggaagggggggacggccgcggggatgggggggatggctggggggactgggcgggaggtggatagccgcagggacaggggtgggaggatggtcacagggatggggggggcgggggggatgactatggggaccgggcagagacgcacaggggaaggtggactttaccaagggcctctggtgagggtaaggggtctctaagaaaagggagagttccagttccttctttcccatacatcttcaggtacttgttagtttatagacagttttaaaatagtgagtgtgtttaaaaaaatccacccacgttttctcagaatctcaaaaacaaagcaaaataaacaaacaaaaaaaaccccacaaaggataattctttattttttatttttatttttatttttgatatggagcctcactctgtctcccaggctggagtggagaggcacgatctcggctcactgcagcctccacctcctgggttcaaacgattctcctgcctcactcccctgattagctgggattacaggcgcctgccaccacgcccggctaatttttctatttttagtagagacagggtttcaccatattggccaggctggtctcgaactcctgacctgaggtgatccacccaatgagggatgattttaataaggtagatgataccagtaaccaacctgagtatacatctcatttatttctcaattgtgcacatgaattttgcttgacgtgggggaaaagcacactgagaaatgtttctgaagtaacttctatctcttcacacaatttctccagaaaaataacgtccaaccaaagcatgagaacagctacagctcagggaacccagagggtccgagaatgtgaccctctggggaagaggatttgaaacgctggagatttactcacataaaaataaaaaatcaagctagttccatgcccatcctgtgatttgccacccatgggagagctacagtgaggtctgagctctgttatttcctgagtgccatggagggtgaagccaccaagaggccccacaggactgaggtccctgctgcaccacaaacttccgtttttattgtatttatttttctcccaaagtcaccaatagcaaacaaccacaaacttttcatgtgaacttgggaaaacctctaaaggtctctaagcctattttttcactttataaatggagataatcctatagttactgtgaagattaaaatagatggtttcctgtatattcagtgcttagcatggaggcagctacagagaaagcctcaagcattcatgagtaagagagacgtattagtgaatagaagttagggccgttctctaagccagagccaaactcttgacggcttggcaaatgtaaagatatttctgaagaagttacagaatttattattactattattatgagacagagtctcgctctgtcgcccaggctggagtgcagtggtgtaatctcagctcactgcagcctccgcctcccgggttcaagcgattctgctgcctcagcctcccgagtagctggaattataggcgtgcaccaccacacccagctaatttttgtatttttagtagagacgggcttcaccacgttggccaggctgatcttgaactcctgaccttaggtgatccacccgccttggcctcgcaaagtgttgggattacaggcgtgagccactgcaccgggccaaagtcgcagaatttagagctggacaagccgacatcgcctcctccggcgggtggctcagtgcccagtggctcagtgctggtgcacggtgagggagacccagggttcggtgcctctcagcggggacccgcggctctcaccagtggtctcgcgtcactgcgcagcgcagggtcttcttgaaggtcttaactttttcaaaggagggaaactgcgataaagatccaagaaaaatgtccctggcagagaggaagcccccgaaagcttggcgcagaatgctggagacccgtggcggcagctcttcgcctgtgcagagggagacgctgccgtgggagaagggtgtgcccacagcaaggcaacgcgcggccggggacgctgctcttgcccgaaggcgctctccctgcgggcttccgcctgggaacgggggcgggtgctctagcccggcgctgctccgctctgaacccaccgctaccaagtttctattcagcaagtggctcaggcaaacatctgagcagcgataaggccgggaatggcctgcagggaggaatgggatgatggggaagccgggtcctgggtggaggaggttggcagtgataaggccaggaatggcctgcagggaggaacgggatggtggggaagccgggtcctgggtggaggaggtgtctggggctgaagccccccatgctgcccctgagcctgggggcaggtgagagacgcgtcctacttccctggacactacgatgggcaggacgtggctccccggaggcaccagccatgtttccctcacatcaccagcgcaggcttttctgaaggctctgggggaacctgccacttaggagagtctctgcacctccacaaagctgccctgagacagaggcaacggggccaccatggacgcctcctagaaaccaggacccagaaaacaggtatgtcttcagaggagcaggatgagaactgcaaaaacagacctaactttggttcttttccttgacgtccagggcagtcattgactcattcactcatagcacctgcagtcagagggcctgattttgaatctgggcttcaggtcttactgactgtgtggccttgggaaaacactaatctctgtgtgcctcagtttccccatctgtgaagtggtgataatggtaccgacttcaccgctgggaggattaaataagataacatgcttagagtgaggctttgggcctgtgcctgacacacaccaggtgattatttgctgttcctactacgatgattattagtttattcaaaatcaggtttgctatggtcccttgccgagtcagcactgcacagggtgccaggaacaccaggctgagccaggctgggtcagactcgccgggccctgacccccgagcactcccacgccacccagagctgggcacgagtgaccgcaagaagcgatgggaatgacagcaacagcacgtgttgggcgttcgtgggaaggggtgccgtggggccgggaggaggggaccctccctgaacttgaggtcaaagaaagctttaggcaggagaggctcaggccccaaggctaggccgcaatggcacctgcagagatggggaggtgtgagcaggcatggggcctggaggtgcgtaagagcttccacggggcgaggaaggaggaggaggagagagaaggggccgccactccctacagcctcctgggtgggcagtgctgcgggcacagcgctctgcatccatgccgcgactgctttcggaatgtgcttttccagggcgagccttctttttggacatgggatgtacccgatgtctacaagcttgaagtaacattgccgaccgtgtgcttcttgtgcatgcagggtctgaagggaaggccttgcatccaccgcccacctaacctcacggctcagccacgttcacgcagcacggttcagtcagaagttcacacctcattcaacccagctgttgctaagtcagtgtggctgtcatgggaccaactgaagagtgtcctgcctcacgccgtatctcaggacatccacaaagcattgcttttgccacattctgcttggccgcgaagccactttctgcagcccgagctccacccccggccataacccaggctgggaagaagttccccgggcatcggcgactccctgcaggtacggcaggggtggcaaggggcgaacagcgcaccaggcccgcgaggaggtcactgagcaagggctgtgcgcgtggaaaccgtgatgacatcacactgacaagttaaaccctggagtcccagcggcactggctgtcggccgtcctgcacgtgcccctgggaagacgtggctgcaggcccaactcctggtgtctcccttggcgataaacacaagaaagccacatctatctactggagacagaaacagaaattcctcacaagtgagctggaaatgcgccagtctgctgcgctcacggggaacggggtcgggccagctccctccaaggacgggggctgggacgtttggccgctgcctctcccactcactgtggcctgcccctgccagcgtcccttccccttgctgtgtggcccctttctgggccacctgccagagctcctcacagtggggaccggcccctccctctccacccttccctggacactcttgggaatctccagacgtgggggaagccaggaaggagcctggattctgcctcatggcttgctggagaaagcactgaggggcatctcatgtggtctcattcactggtcctttaggctgattatagtttccaaattcataatggaaattctatagtctgtccattctcagtcctttaccttaacatttaaaaattttgtaaggaaaaacacacttcttactagaatggaataagaaatgtagaacgctacttgacttagtaatggtttagccagtgccaacgagacaaacctcacagcatttgaaatcgctctaggttataatttgggacatttccaccctgcatgaggtgactctaaccctctaagcaaggctgccagtgtgggctcactggagatgccactgggagctgtttttcccctcccaagactagaaagtgactggctacagcgggggagggggccacactcctcactcttcattgaaaagtagcatccacacctgaaaaggcagtcgcatccacggtgctgaacggaggcgtgagcttgctgaccgctgaggcgatgactgaatggacagcgtggcacacatacttctttaaaacctcagttgaaggttacagcatcagctgccatcacaccagaactgccatcagacgagagcagccgctgcccgtatcacctgcgttcattatcagacttctgtgggggcccagggcacagagcgggggctcctgtcagccagtgacagaaatggccatcgccactacgaatactctaagtaccattctgtgtggtgagtttaaaatacagaacggtagtcgggcgtggtggctcacgcctgtaatcccagcactttgggaagtaggtgggaggatcccttgagcccaggagtttgagaccagcctgggcaacatagtgagaccccatctccaaaaaaataattagctaggtgtggtggcgtgcacctgtactcccagctacttgagaggccgaggtgggaggatcacttgagcccaggaggatgaggctgcagtgagctatgattgcaccaatgcactccaaccctggtgacagagcaagaccctgtccgcctacacccgccaaaaatacagagctatgatctcgagagcattttatttgagcaaaagataatttataaagcaaaatcaacaacatgagcctcctctgagagaaagctggaggccagccccatcatgttttgaaatttccctgatttataatcctcggtaaacacaaagggtgcatcctcacccggaacaaaactctcctggtcagacggtgaacaccccagagtgaggcctgtgggccacacgagcctgctgaaggggttaaccggcagtggtgccaagcaggaagccccgagacctgcccctccacagcgcctgcttgcaggggcccaagggcctcccctgcacagcctggcctgggggcactgacacatttttggcaaacagatcttggccggacagaaggtccaatccttccagccacttcacttaaaggaaaatcttctatttaagatccagactcagcctaacaatcacgaagatggctctgtttatgatccgcgactatgcaccttcagccacagcggcccagtgtgtgcagcttggcgaccttgagtttgtaaggatgagtaagaccttgtggcatttgcgtgactcaataaccaacaggtaattaaatatgaatgaagaagaaaggtagatgtaaccacataactcttttgattgtagatttagctgcgatgtcggcggcacttgcgaattccctccccactctgaggagctggacggaggctccatcccactgagggctgggcatgggcctgcctggccctgaaggcacccacggggccactcccaccagggtgtggatgaaacctgttttcttttctcttcccaattcatactctttagcagcgaagaaaaaacaatatatatgtgaactaagaaaaggactataaatcatgctaccataaggacacatgcacacatatgtttattgtggcactattcacaatagtaaagacttggaaccaacccaaatgtccatcaatgatagactggattaagaaaatgtggcacatatacaccatggaatactatgcagccataaaaaaggatgagttcatgttctttgcagggacatggatgaagctggaaaccatcattctcagcaaaatatcacaaagacagaaaatcaaacaccacatgttctcactcatcggtgggaagtgaacaatgagaacacttggacacaaggcggggaccatcacacaccacagcctgtcaggggctgggggccagggggaggggtagcattaggagaaatacctaatgtaaatgacgagttggtgggtgcagcaatccaacatggcacatgtatacatatgtaacaaacctgcacgttgtgcacatgtaccctagaacttaaagtataattaaaaaaaaaaaaagaaaaaaaattccaggtacaaaggggaagtcatttatttttgtgccatgctgccttgcatttttggaatgcctgtccctggagatggagctcacatctttccggaaagctctgaaggtccctgcgtctcagtatagctgctctgtagctttttagctgtctggcccctcttaggtgttgagaaagttattaagaaaattattaaggatagcatgtcaaattcccagtgagaaggacgcatttgcaataatggaaaaagggcacggttttgcaggtcatctccatagtaaaatatcaatgattataatgtgcctctattcttgagaagaaagtattccagagccattagtgtgttagaaaaaaaaaaaaccccacagtagaaaatgaaatccattattggcaaaaaaagcaagccaagacagagctgagatctgcacggtgtggccgtgtaaggcagaggctgaggaccaggactctgggtccagatcacccggggctgtgtgccactggacaggctgccaaaagctgcgtgtgtgtttttaatctgtgaaatggggatgaaggcagagcagctccacagagttgttgggaggactctgagggtggatgtgtgtggagcacagagtacaaggcctggcttgcagactcggcccgtgtgacactgatctcaggtgggtgcaacaagtacacagcctgacttgcacacttggcccatgcggcactgatctcaggtgggtgtgatgagtacgagccctggcttgcacactcagcctgtgggacactgatctctggtgggtgcaatgagtacacagcctggcttgcacgctcagcctgtgggacactgatctctggtgtgtgcaatgagtacacagcctgacttgcacactcggcccgtgggacactgatctcaggtgggtgcaacgagtacacagcctggcttgcacgctcagcctgtgggacactgatctctggtgggtgcaatgagtacacagcctggcttgcacgctcagcctgtgggacactgatctctggtgtgtgcaatgagtacacagcctggcttgcacgctcagcctgtgggacactgatctctggtgtgtgcaatgagtacacagcctggcttgcacactcggcccgtgggacactgatctcaggtgggtgcaacgagtacacagcctggcttgcacactcggcccgtgggacactgatctcaggtgggtgcaacgagtacacagcctgacttgcacactcggcccgtgggacactgatcttacacgggtgtgggcatccccctgccagtgcccgcatctacatttgggcacagagaagccacacagcctcacgggagctgggggcctctggcagggcctccttccaggacacaataccaaggaggccagacccccagggctgtccgcactggatgaccctctggccactctgtcctgctgatgagaccctctccctgcctcctccctctcagtaaaactagagtaactaggcatttttaaagaagatggtggcgtcttccactgttgccctaaatggaaatgctccaccgcaaaactcaatgtgatgctagtgcctcacgacctaacaccctccccacggggcagcgtttgtcaggaacggtaaacccagcgcgtccgcacccaggcgcagaaactctccatcagggaaatgtgaaaaattgatctttttgcagctcggtgctgcctccaacacatccagagccaactggaactgtgagtgtgagcccagtggcactgcaagcgcccacaccagcaccctgccctgggcagagtcacgtgggaccatccccgcaggacagtgctgcacccagagcccccaccctgaaagcttcccgtgctctgagcagctcctcaggtgtgagcacacaaacagaggaggccatggtcagcacggcacattcggacaccacagtcctcgctcgccgtagagccgcctgctcctctgctgtgcccaggccggggccctgggcgtgtccgcagagtcctcaaagtatcttatacttctctataacacaatgtgcaaaataagctgaagaggattctgggggcagaaattcatccatacacatcacaaggcaaatgtctcatctcttaactcagcatctgatggagaaaattacagagtggaaatcactcagagaagagacctgtcattcttgaattctgccaaaagaagaccaggacaacaaaggtttcaggaaaacctctctgcacgcttccgggagccaactgaatgaagccgtgttgcccgagtgtgcgcacagagagccttgggtttttagggttatttcgagagtgtaatcactagtaacaggacaacactaaggaattaaacgtacaaagctgggcaggaaaaagtgggttcactgggctctgctggggaggaataaaggccactctccagactggacgtggcaccaagagaacgtggtgaacgggaaccggctctgtttggggagggccctggccttcagctcagagggcaacacacagcagaagccgcggggcccggtgcaaccacaggtggctcgaatgtaaaacggttaaggaaaaagcctgcgctctgtcagtttgacactgaggctgcagggcacgtgacgacaggaaatctaaacaggaaggtgaaatgttgagaaagcgtgtgcagggaaaaggccggggaaaaatattccaggttgttaaacggggtcatgtgtcatagtggggaaaaaaagaaaaaaaggtttcttgtataatcacctctccccgatcatgacacagttttacttgattttatttcatcataaaactcagagggactcagaaggaaccgcctcacatgctaggccagcaaggccagctgggagcagaggagcagtaaccaatgatttcgttgaggagagcgactttacacaaacactccaccatgctaggtctctgatcggcaccgctacaaggtgctccggggtctgggtgcatctggggcagccctgtgagacctcagggaacacagggccacgctcacttctggagagcaaatggcccacggccgcccctgaatgccaggggagcctcccttcttctgccacggagtcagggccccggcagccgagcctgtccgtgatctaagccggggacgtcctcggctcatggcccacgtggccaacgctgctctggtgacacagtcccaccgcctccagtggcttctccttggtgtccaggtaacttttacacttggaccaagaacaacccacacacgtgtttgcacgcgcacacacacacacacccaggggaggatgcccctgacagcagcgcccaagccagggccacagagctctgcaggcccctccccgctcctgacacacgacgacacccagtcaggggctgtaagcacagctcctgcaggaaggggttccacgcacgggcaaacaagccgagtcagcccacgatgagcgatgttggccaagcaatatggagtgagttcttcccatttcgcaagatgttttctcaaaacaaaaattaaagatatagacatgtttcatgtaagtgaaaaataattttcaacactcttctaaatgtggaacagtcttggaacagcctaagatcagtaggaaaaaagcggcctctccgctcgctcagcccccatccctgcggcgcccagagcaccagccctttctcgagtccccacacaacctcgaggccgggctccgggcatccaggcgtgtgctgtttcctagttattttcacgtccatacccctgcctcccacactcaagagcagaagtccttctgtctgctttctgtacccacagcatctacgtggtgcagaggggccctcgctgagcccctgcacactggtcagcatccctggcctccagatcacggctcgctcagggaccgagtgtcccacaccaaggcagccctgggggagcagcaaggggcacggctggagcagctgcatcgagcccccgccggccgacagctgcggcttcctgctctggggaggtgagggctgtgtttgaatctcctgaagcccctggtgggtggctgggaaacgcaggtgctccacgtgaagcacagaaggcacgtacgggctcacgggacccgcggtcagctgcatccgagagtgaccgacgtgctgaaacccgacctcctgcctccctttttcttagggactgcctctcccctaagactaaagacattcattttcttcatttgctctgctcctgataacatcagattgaaaccaggaaacagttgtgaaaataaagacattggaaggaaacacagaattttaatgagcatcttctctctggaacagcccatgtctaagaccggcttctgtgatggtctttaatgcttccataaaggtggcatcttagatgtgagagggagcacctttaacccacgatgcctgcaacccttcccgttgtcatgggagaccccagtcacaccgcagcaaagcccctccagccagactgccgttggtgagacaaatccctcccttcccggctcccacggaggatgactcaccgggcaattaagttctaagggcttccaaaaaagtcagtggtgccttcaaagttcacagatccaacacgacctctgtgagcaaagccagccttgagaggccccacaggctgaaccttgcttttcagtttcatagtcagacaatttaaaatagccagtcagtaagaaacaagtcatccgccttcagagcagcccaggcctgacgtggaagtagagaacgggcagctgttttttttacaagaaacttttgcaccttcctaattttctttttgctcagaataagggctgattttcatgtgccatccctgtcatcacccgcatcttcagcctgcagcgcgtagggaggactccccatgggcgggcaggactctggacctgagaattgcacaggatggtttccaagagggtttacatgctcccccgccccccgtcccctgcccacagacctgctcttaccacatcaagatcttagttcaatgtatcgattcattcttatcgagcatgtaaaggtccccggtgggtgctgtgggtctattggacagacctggcctttgggaagccaaggctgtccccacacgggctggtctggtgtgggcaacaaggcccgctctgcacccaggcctgcctccatccaacacaatgaggaagtcaccctacactggagggatggtgacgagacgtcaccgcagaggcggcagaagggataaaggggaggtagggatgaatagggccctggtgttcgggatgggacgggccaccccgggctgagatggaagctcaggggacgggggtctgcacagggctggacagatgggagggtctgcagggataaagtgggagggggggcggtgcaacggagggagccgggcaaacaaaggctcagaagcagaggagcccagcccagggacacaaaaggtattcacatccttccattcggtggccaccacagcttaattaagccaaaggaagggcaggggcatgcgggctgggggcggagcggctactggagcagctgcttctccattttcggaactgcacgtcgttctggggcccaattattctacctaaaactgatctgagtgacacctgaactgcacaaggcctgaaggacgccctgaagagcttcttcctaccagacccccgaaggccagggtctgggggcctgctgggaatcccggtctcagaggtctcagctctgaccgaagggtgctgagccctaaggtctgtacggggagtttctaaaagtctacgctgtaccccaagaaggggacgggtggggcagcagccctggaggaaaacccgtgagcgagtcgtggagggagtgtgagggtttttggggagtgaactttgcagagggtgctgggagcagccggcccgaggacaccgctgactggggtacaggggccacgggtcgcacgtggggtgtcagctctgccgcctcacttggggttgatttgaaatctcaagatgtgtctgaaaaccccccctggagaagcgaggggcccactgggaacgggaaggcctgagcaagacagacgcatgcccggggcgaggaaggggagcctggaaatccaccctcagaagaatcagacacgttttctagactttccccttcacatttcagcttcacgtttggggctcacttaacaatttgtatatttgttctccttgaatctggtagagaataagaaatccctgggatggggacagaaataattctgaaactcacacaccagctccagtttccatccaatttagtattttgttttgcaaaaaaaatctgcattgtatttcctcccactcaggaacatccgatctctggtttcagggtgcgttttacaggccaggaaaggtgattccaggtcgggaaaggccattccaggaagattgcgttattgtccactctcctgcatcatcgtcttcaccaaaaaagctgaaagcgacgaaacgcctacccagagggcaaatccagcttccgctctcctcagaggtactcagtccagttatacatcaatgtgagaatagtcccagcacttatcacttgtaaactcttttaattgattagctattaaatggcataagatcaatccaagtttaaacctgtatatcaaatccacattccacaaactctgtagtgaattatgtattttaaaacatgtagctttactggctaatgtaatcgtctgcgaatcttcccatctgttcttcaagtcactgtacctggaggcgcacactagcacagacccagacactcaattctggggctgcattattatcctgtacattaaaaaatcttgaaagggtgcttgttcacacctgccacctttctagtgagtctcttgtacttgctaatagagaaataacatacccaggttccatcctttttttttgagatgaagttttgatttcggctcaccgcaacgtctgcctcccaggttcaagcaattttcctgcctcagcctcccgagtagctgggatgacacgtgcacgccaccacacctggctaatttttgtatttttaatagagacggggtttcgccatgttggccaggctggtctcaaattcctgacctcaggtgatctgcctgcctcggcctcccaaagtgctgggattacaggtgagcccctgtgccagtcccaagatttcattcttaaccatcagtaattctcccaaagcagaaaagccacggagacgttacattttgagcaacaaagtttcagaacagctggctggatgaagaagggagcactattctgcagcccccatggaacaggaaaagccgctgttcagacacctgcagaaatgcctgactctgcccacctcacgtccacataaacctgaaaaaatgggagaggagtagctagctgtctgcccctggaagcccctccatttcccttgtgcatcctggcccctctctctctgagctcaggcccttccatgctcctctcccgccccacagaggccccctctgtcctggcccctctctctctgagctcaggcccttccatgctcctctcccgccccacagaggccccctctgccgttgcctttttcttcctctcccacgttctgttctcacgtactctgaaccccacgcggcacccagggctccccgcgttctctgagccccatgcccgccccacccggcacccagggctcccctagggtcacagtgttgtctgtttccgggttcacactggggagtccttcacaaaggcagactgggccgactctgatgtaagatcaagttctctgctgtccccgttgttccagaatatgggattctacccttagaagcgataagctttctgagaaaacgccttctgggtcagctccaagttcagctatcccgaggttccaaggctgtctgcccacccagacccaaggtgtccaatccttaggggtgaccctcgggccaacaccaatcacagctctggggacccccacgtgtcagccatggcaaaatgaacccccaacacagcaggggagggaaggaggaggcggggctcacagagcagagagccatggagagctccgggccgaaggggacttgggcctgggagagaagagacagccaggcggcgagggacttgtcctgtggaggcctccccaggaggcgagggtggggggactcctgctggaggcggccggcagatcagccttccttatccacgtcctcgaagtgatccccgtttgacatttggaaatgactttcatctgctgggtcctcctcggtttgacgtgcaattgcttttcccgaagctttctcctcttgtaacacccagctcctgcatgccgtggcggctccagccatcattcctcatcccaccaccccgcgcagcgtcttgcctccttttatgccggtgtacgtgttgtgttaagagctgggctttgccatttttgacaggctaatgcatttcaccacagataatgccattcaccacagaggcgcattctctctcgtgcccatcaaggcagaggctgagaagaaggtctgctttacagcaacggcctgaggaccctcggccccaaggtgaggccccgcgcaggtacctctgtacacgcctgtggagtcccaccctgtcgtgtgcacgaggctgtcacctggagattccggccctgccgggcgtctcctcccacgccgagctcctcctgccgggggggtctgcacagttctgggtgggggaggctccaggagctacccgaggcttcttctccttgccaacaacgatgccctcctcccgagggacggtggccccaaggggagccgggagagcagaggctacaggcagggagtggggagacccagccttcaagcacagcgccccttgggtgggacttgcctcttgctcacacccactcctacctcctggtacccgcctgctggaatctcctccccaccgcctactgtttcttttgaaatcccagtttaatccacttttttacacttccctttactccctcaagtgtctcctcccaacacccactttatttcacagcggctcgcgtccttcggagagcctgcctcccgccatgggcagcagggttcccgctgagctgggcccacctgaccagggcttccctcctgccgagccctcacctcgatgtgagccctgaagccccttgggctgggaggtgaggtgttcagagcacagatgcccgaggctgcacctgcaccaagacctgaccttaccccccagggccccggaccacacaggggctcacccgggtgttggctcacccgggcgccttctccgaacaccttccatcaagtgtcttgaattctgcagagcagcccaggtttcagggctttgcttctgttttcttctctggaagtgcatgctttgcagacaccaatgtcctcagttttagttcagaaaatgtgtcccgcctctctaatcaggtctaagggaggggagcagctcatgccgaggaggaagtgtgcggaaacgggtaccctggaaacgggaggagcaggcaggaatccaacacccatcccagccccgcgggcactgacagtcgctgcagaccgggcaagtcaccctcgggcagcgcttcagagctgacgtggcacccgcacccacagggctgccctcatccgcatggcggcccaagaggaggccccagttcatagatgaggaaggcggccttcgggagggaggggctgggcctcgcaccccagggaatggaagggcaatggcacctttcttccatgaatttcaccattggagaaaaagttaaaagatgaaaagtgtggcaagaggggaataagataagaaggaagaaacggaggggggtgaaagcaggcagaatgtgcctcttctgatcctcttggggtcactcagccacaccgagccatggaccgtcccttggagcgccacagactgcagggtttgtccttgtcacgaactcaaagagctgacctctctgggccggcacacaacttgcagccgagtcctttccacgacaccccagctccctgtctaaactcttggcctgactgggaggacctcttccctctagcccagttcctcctggcagccctgcaaatgcccaccctcttgggtctgtccctaccctgcagatggctccagcacctgccccagccacgcctccatctcccgccagccgccaagagctccacccaccacctggcccagcccctcctctgtcatctccaaggatttgatttcagtttcacacgaatcacctcctagtgatgcgtggactaatgctgtttaccgccggttcactttcattgcaaactcctcatctccaagaaatcatcaaccgagaaaagaaaggatgtcaccttttcccaaatctcccacagtgcctcacactacgagggaagatggtggaggagctgtccagacccacgggacagaaaagcccgggccagcccctcaacaccctgcagtggggacagcgcagctggggaccgcccagtgcagctctgccactggccctgtgggctggggcgcctctcagtttatctgctgctgactttgcccccttgtaaaacagggttgggagataatgagatgcctggggaaggtgtcctgggtccctttccacagggtccctttccacggggtgggtgactgatgaggacagggggtgcctaggaacaggggctcggaaggacctgctgtgcatgcaggggtcaccccaggagcgaccctggctttgacgagaaggaagtgttctctggttctggcagagaaatgtgtgaggcggactggtacacaacacaagcctaagggaagcagcacccgctccacagacaccacgcacaccgcccctcccctggtgctgtgtgagcacccatcctcctcccggggcccagccctcttccttggctgctggagtgcagggtgagcacgtctggaagaagcctgcagcccccacctcctttcctgcgcccctccttgtgtgtagcaggaagtggcttccttaggaagcagttattcgagtcatacccaggtgtgaaaagctaccaaggtcaaggcaaacataggaatggcctagtgccaaaatgaagccacagaattcagccctccacattttatgtctcagactttccaattttttttttatttccaaatatctcactgcgtggtctctgtgattttaattaagtctgatctaatgactactgtctgatggggggagtggcttgctgtaccccaacgagcagcatgcttctgttttatgtttagaggtttctctggccacctttcgagacttcattgttctctgaagatcgagctctatctctcaggagctgtatctgaggaagcattttgggcaaaacggcaggatgtacactgcttttggaaactgcatctgtgaacacttcagatttatgagaaaaatgcacttcaaaggggcactttccagaaaaacgttcagactcatggtgaaaaggtatctagaagattccatggagcctgcagaaaccaagccggctgaccccacatactgatgatctatactgaacacacaggcaaacaaaaacaggttcttcccacactggggacgacacgtaccctttaccctcatcatcctggctaaattctgcaggtttccttccgatttccttcacatcagaaaccatgggatttggcaccagcgtgacaaccatttagcatttgctgattcctagttagtccagggaagttctgtgccgccatggagtatgggaggagggaggcacggccttgccctcccggggcctggagtctgttcccggacaatctgcaaaaccgaatccacgtctcgaaagtttcaagagaattctactgtagacatctgtactatcagctacatttggaaaggattataaaattagaaaaatttccattttcaggcttgactttacaataaaatgttctctaatcataattatttcataacaaatgatctttaatgttgtatttttatacttgtaaactatttggcacagttttcacagggtgcccttcatttttgaagcagcataggttttgcttatttgagttttgcaaaaaatatattattttgacctggaaatttaaatatatagtgaggaaagccattctaagatacagagctgattgaaaaggctttgttaaaaacttctggtggggtcaagtaaacctcagtaaaagtcactgttttccaatttaattgtgaacatcctacttctattactcgtgattacaccaatgcctgaagattaaactcacctagagaaagaacggtctcttaaagccccagagaatgaaccaaggcgtgacctgtgctctttgtcagaactcagctttctgcaccgggggtaagaagtcagggtgcatttgggacttgcagacacgccagccccagtcaactgagcaccctcagatcgcagcaattgccaccacactgtcactgcctttgtaatcacttgctaatgggagcagcagcagcgaccgagacgtgcacttagccgctgtgtttacaggaggtccccgtggcccggatgcatgctttcctctgggtttggttccaaaggcctccaagtacacaaggaaacctgctgggtattgtgaaataaaccatcaaaagagaacttgctgaaaattctgcaggagtctctgccctcatgtcggggaagggagagtgggctggcagaatactaaacttgctgctcaaagatgatcaaagcctcaaggaaatggatgcaacattcaaagagactccgagagaaaaggaggagaatgtcttctaatcatctaacaacttatttttggcacagtttttacccaatcaccttccatagaaataggacacctacatgaaaaaagaatgcataaagtatactggtaccaaaaatcacaattcttccatgtcttcacattatccttagtgtgtgtgtgtgtacatgtgtgtataaatatatatatacacacatatatgcatatatgacaggctatgccaatttgaaaaaaaagaataaaagtcaataaaattggatttttacatcatgaagtacagaattaatccaaatatatcatgttttatctatttagaagaaaaaacaacatttactaaaacaatggggagaagtttggtgcgagtagtctgttaaacaaatgacctttaagaatatatttcagttattctgaaagttaatacacccaatttttgctccagtctgagcaaattaaacttggctggattatctgatggggttgatatcctggtaagtgtcaaaaatatgagagtctgtcaaaaaagatttgcttttccaataggtaaggcaaacaaaaatatcacactcatgtaaatgaagaaagctctaacatcctgaccctgtccatgaaatagttctattttgaggaaaaacaggtaaacatgtttgaaggtgtttgcattagaagctagtaattcaatctccttactgcttcaaaactattttaagaaaagctctcttactccccaggagcacaacgtgggccccctgtggtcccaagcccaggctctgactcacacacacaggggtcggggctggggggttctgtacaagcactaatgatgtgcgtgcattatcagggctgaggcggacaaatgctttagcagaggttggcaacatgagggccccccaggtcacgcgggaagtgccttgccaggacactaacccagctgctgtttaacagaggacatgaggattcaccttttggaaccccagggaggacgcagctctacaccctgaggccaccagtgccccccaggataccacctccacgcacccgtctcctccactccatcagaacacctctgctcctgaccttcctttccccaggtaagaacacaagttcttttgtttaaagtgtaacttcatattctgatattaataaaacttatgatattgccacctaccattctctctctccgaggttacctacctctcacctaccttgcacaataatctttttatttttcagaagctttaagacaatgaattgagtagttccagcatgtccccatgaaataaagcataagatcaaattgttccattttccttgtaacccagtgatgagagttatcatccacaacctcactgtgattatagaatcagcaaagtacacaggttcagtgagccagaaataaatacattaatgcgagaagacacctttcctgaaatttgttttatgtttgcaatattttaaaaaacttttcaaacagatttttacacttcacaggggactcatggctgtgatagaaaacccaagtgagatatggatacgttaatgaattaatacctgcttcatttaccaaagtaaatatcctttccttgtaaccgcaattgtctgagtccttgacacgttactcagctaacttcaaagtgaacaatcatacagtcccatcctcactactgcgtcctgctccgccaaaacacaaatcacaacaacacaatggttcggcacctagaactttctcaccgggaaacaatccaccgtgatggggcaaacccccactttaatcaaagtacttccctaaagggcattttgtggtgatttcaaagctaaaccaaccagaaagtctttacactcatttcatttccaaattttcctagatcacatttttaaagaaaaaaagttttttttcctttttattaatctggattgaagaaaagcacacatttcatttattgtctggattacagattcttattaaacaaaccggagctcattataaaatcaatatcaacttaaccaccatgccctcaggaggaacagcaaaaaggtcactccaagaaattcaaacaattttcctgctggaagggcatgattttaattacagatactattaattagagctgtcactgggaaggcttttttttttctgttaattatcacaaactcagtcctaagtatgcattttcaacctgcagtttttttttcaaattagtcatttctgcatgcaagtccaacctttccattctatcaatattttatatttgaatttcaaagtatatcaaagggcgccacgctttctaaaaatctctgcctgtatgatcttccgtctctcacgcatggaacagaactggtgtgataatttatttatgtactgacacagacttggcctgaagacctggcatcctacattgaaggtcttgctcaatggaatttctggataaattcttactagtttatgtgacatttttttcaggctgcttcttcaaacgtgattttccttttgctttgaagcaaagctatgcactgcaactgaaatgccagcctcaacacatttgaagttgccatttctttgtaagaaaaagatcgtcctgaccgggctggtgaccctctccagaaaactggaggcttcctccattcaatggcaataccaggaattttgaaatgggaggaaaagctgtcttgtggtcaatctcttttaagcatagagattgtgtaaattccttatgtgggggagggtcctgagagctcacagagtatagaaaagctagctccaaggagctcaggcagcaggagggtatggtgctggagggcgctttgtggagagagcttgagagcccacccatgtaactctgatgatggaataataatatttactttacatacgactgtaaaaatgatgaattatttacaagacgtattgcacactgtaatcatgtgactagagaaaacaaaggatccagtccaatgaggaaatcttacacatgtactgaccaaacttttaaaacagtggttaaggagtcatcctaccttcccagatgggaatatcttctcggaattaaatgatattttatatgcaaaggaatcaaacgccttgactggtgtaagtattctgggcttatgctgctgttaaaaccgaaggcctatgttcattacaggacaatactaaatacgaaatgtgcgccatagaacttccagaaactctgtggttttttaaaaatgcccgacttggtctgaacttgccttcctcgcatcctccccggtttccagctcatttccaggggtgtctgtggtgcctctagagaaggtgtccctcatggggacgcgtgtgggtcaccttcccctggtcagcgttaggcttcactggaccggacaacagcacagggtggcaactgggcaggtcaaaggatcttttcacagaagaccccgaggaagccgatgatttttgagacatcttcaaacacctacacgccaaatgatctcgcaactctggcacttttcagtagtagtggccaaactaagataacagataatacatcattcatgtactgtactttttccacacttctaattaacaacattcttccagagttaacacgaggctatccaagaagagcagacggatacagagctgcacaactgtggctgcaacgtatttgcacgaatgctgatgagaagttccaaactgtcctcataaaagaccccaaactatgatacaggaacaactgctgggaatggaggaggggccagagaggaacgccatcatctgcctgttcaacagataaatccgatataccactttttaaaaagtctcctcttacctggtaggcggcagtggcatctgcacctgggtcgccccctagtcccgagagcttctccttcagcctgtgctgagagctatggcggaggcagtagatgaggccagaggccaggaggacgcccaggatgcaggcgagggagaccagggtgagcgcgatgaacttggtggagtcttcttgctccgcctgaggaggcaggaacttgagtttgcttttctgcagaacaaggagagaggggtgtgttagctcctgacaaagcatgacctcctaaaaacacacgtctccaaatgcaacttgaaagtggaaagctcagccccacaggacgctgtgctggccctggagccacaacgggagggccctgcggaacaacccccgtcaaaggagaagcagaaatcatttgaaaatagcacatcgcagattgcagcgtgctcaagaggacagtcagaggcatcactttttccttcagtggtggctgtttttcaaatttatgtaacgtatttggcagctaatttgctgccttaagtaaagtatccatcccttcttctaaccgggcacagcagtttgtccagagcttgcacaatgattgtcgggggtgctggggggaggccaggcttggcggtggaggagggtgggcaggcccggagccttctgcagcttcaagtagccaccaagtccagcacatcttcagcaacaaaggaacgtgggactggctctgtgcatcttcacagaacattctccctcccaggtcaggggatttggatccacctgtcttgaaaggcgagcgctggtcgaatcccacctgactccagtcactctccaggagtggcctggtgcagaccacaacacttgccacctatgcacctacgtatttttccttgaaaggagctgcagagcctttggaacttcacttctcagcgaggaaaacccttcagattctcactgcttcttggagggcgggggtagggctggtgaaaatatgagaaagccctttcggtgcatttcacttgtctccacgtgcaaatagttgcacggctctcccctcattaacttcattagaaggtatattagcaacaattaaggacgccacaggaaaatgggaaggccgccccgcagaccgcgcgccctgcacaatgactcggggagtgaatgggggagcacgcccggccttggtcctggctgctacaagatgagaacaattagcaaacccctttccaccacctaatttcgcgtggtaacaaaatggatttttccccatgaatgcctggccggcctattcattatctctcttctattagtaattttctgctccgtattcagcctcccaactcttcatttcctcccgtctcccagcgtacacagtgcctcttatgtcaggccgggcccgtttttatcttgtaatcataaaggccaccaaagcaattatcgccggtcttgactggaaaagctggtcattaattagcctccttttgccttcggtgcagcggattagctggtgccgggactgagttaatggaaacgcgggttaaatgagaaaagacgcccggattttcctgcctggatgcgcggctcggaggaggaccgcgaggttctccagcggcgggaggcggtggagccgccgcggagagggagggaggctttggagagggagggaaggaaagggggagggagagggaaaggggggagagggagaggaggcgcggggtgggggaggggagtgagcagggagccgggagagggaggaggggcgggaaccaggggagcggcccgaaccccgtttggtccggaccccgcagccaccgctgggtctcgccgccgggtcgcccttcgcgtggagatccggtccgcgccccctccccggtctcctcccctcccctcccctccgcccccctccctccggcccacacagcctcttccagaaagaagtcactctagagccgcgcgacccagccccagagtccgccggggtccgcccaccgggtctcctgcgcgcccctccccgcccctccccgggcacagcccgttcacgaaacctaaggcgccggccacgcgccacctcccccgggccggggtctcctcggtccccgcgcgggcgctggttctcccgggtgggcggcagccccgccctgtgccctcctgggccggcgcgagggaccctagagcgcgcggggggccccaggcggggaggagcggccgcgaccccggatgcgagaggcgtgtgggtccaagcggcgccgggacaggggccgggtcctctgcccaccccagggtccatgttcgcctgcggggccgcgtcccccggagccatacctgggcgggagggcttttcccgggggcccggcctgcgcccctcgccgcccctcgcccctcgcctctcgcctcccgcgggtcccgcctggccttggccgacggaacaagaacaacaaaggaagcggcgcgaccggcggagggggcgcccgccgccctcccacccctcatcccggccgggccgatggcccccgcgcgcctccatccgccccagcgcggaggcgaccccggccccgctgccccggcgtcgggaggacaccgcgcgctcacgtggatgactgcgcccgggaacagggacttcccgaaccttcctgccccgcgccgtgaggcccacacgcgcgcggtgaccaccctggttctgagggggcggcggggccacggcgtgtggcggacccggcagtggcacccaggctgtgcgcgcgggtgtgtggggttccgaggcgcagggcgaccgccggctccggctccccgaggaaggggcacaggcgctgcccgcggtcactcgggccaggtgagggcaggggacgcgcgggggccggaggaggaggcctggtctgcgggcggcaggagggacccggggccagccgaggctgttcccagggaggcagacacctgctgtcgccgggaccctcgacacgctccgcacgcgcgggagcggaaccgggcctgctttggaggcctcccttggcgcgcttggatttactcaaaggtcaaagaaaaatgtcaaggagagcgattgcctggagagctcctggctctcctcccgggtccccgctgggtcccaggagtccccggaggggaagcaaggagccccagtgccctggagtcctgtctccaccaacctcgcccggctccctgctgcctaggcccgcgctgtcccagcagaggaggggtgggagccgccccaggcccacctccccgcgccggtccacaaggaggcccctcctgcaacctgggagaggccgggggaggcccggagggcgaccgcgcggggccgcgggacctggacagccggggagtcgtgaccgcgggcagcgccggggctgagggcgaggagggtcttactgcagggaagggcgggacgctggacagagggaccgactggggtccaccggcctgacacagaagtcgctggatcccagggcccggctgggaaacccgcttcctacccgcccgcgggcgccgcagaagaaaccgaagaaagaggtcttccctccacgcccaggacggtttcaagtgtcccacccagcgctgagcaggagggtgatgcggagggaaaaactgttggctgcaagtcaggtcttaggaatcccggaagaaacgaagatttaaagaatttttttctaagtgattgagttccaataactttacaatgacttgactccctttttgtggagttaaaaaaaatcttcaaactcctgctagccatggcctttaagagaaagaaatgagtttaaaagtgagtttgaggcacagtcttgacccaggtgtggctttggtggtcctcagcgccatctcccccatgggcaccgaccccccaaggctgcaccacggcgggtggaccccaaagagagcccagactaattagaggcatcttatcagtcttgacttgaaattgaaagaaaattatgtttaaatatttatgactttgacatttacagtcaggcgtttttgaaaagcggaacacccccttctgtacagcggcagctcaatgactgaaagtttggaacagagaagaagtgaggaggaggaggagggagaaggaggcctggtaacacagcggcaggggtgcgtcccgggtgggggagatgcacagataggcacacttcagtgctgagttctcagaggcaggaatagtataatttaaaaaaataatcaggaatgattaagttaattttatcccaggttagatctatcttgagaataagatgaagtacaatatcgcatatttcttcctctcaaccgtctgcacctgcaactcctcaaatttagaatagacagtattgcaaaagttgtgattcaaaataagtgtatgaccacagagacaatttgtggagctgtcttagaacttagcatctgcagacactgtcctgaccaatttaaattattttgaccgtgcccctgagtggaggtgcatgaggcttccaccccatgcccttgtgagccatttacgggaaaatgccttcagaacttttttagctgtccatgtggtaagcttaaaagaaaagaaaaaaggacatgttatgcccaaactcaattgtgagagctgatacagccacacaaatacaaaactttatggtaaatatgtgttgacgggtagccagatttagtccttttccaaggttgtgtgatataaccagttaacaggagcagttcattctctgagtcacgatgtgcagtattaaaatatgcttgcatcataaagacgtagggatacaggtgctcggtgccagttaatgttaaacttctaacattgttgatgctttcatttgtatcatttctaaggaatcagatttcagtcccagcctcatcctatctttgtgtgcatttaaattactaaattataaatacctttttctcttaaaacttagaagtcagttttagagaccattaatgagttgctgtaacaagtttatctttggtttgctggatgaatcctcttagaattattaggaaatttcattctaaatttactaaaaggcattactaaaatataatactcactttagggctgatgaacattttaagttttcaggccatagcaagtgatccaacttgaaaacacgggggaaggggtgtcttaaaatattttaaaagtattttttaaagctgttaacggaactacttttaatttggaatttgccacagaattctaataaatgagagaagtcaggcggaaataatcatgtattaattctctgcattacaaaatcttttcagaagctattatcagagcaagaggcactgcggtctgaattcagggtgggagaagccctttgtgcaactgaaagctattgttcctccgtgcagatgaaattgtacttgcaaatctgccattcaagtggccaaaaaacccaaaaaagcaaaagaaaagaatcttcaaggaaaaattattcttaaatgtaaactttaatgaaaataagttgggatatactgttttaaaatgggctatttgttgagtttttccaggcatacacttaaaagtgaatatacaagaaaggcaataaattgtctatttgccatctttaagcactcctaaaacatcagttttaaagaaatactgtgttttaagacatcagggaagatttatgatactgatgtccaaagggggaagcacccttgtgcaaactaattctaaccagcagattgcctccggtgggagagagggacccagaggctgagcaggggaaggatgcccctgagaaagccgcccccagcctctttcagactctccgctggcgttttcatgacacccaaactcagactcagcggatcacacttaaggcaccggctcctgacccctatttttggcccgcccgcctggtccccaggcctgcctggacgcacgcgcgccttccacaccaggtgcttctcgggacggggcctggcctccccaccccgcaagaaccagaccctcttcaggactgggggggttaccgcttcgcctcctctacccggactcagaagccccaacccaagacccgcctagcgtcgcttgtcagaacccctctgtggcacgactttgagcagagggcgagggaaaggagggtcagcgttcggccccgtcccctgcctgggctttctcccccgcttccccgtccctcccccctcgccggttcaccgcatccccacaggagtcataaagatcaggccccagcgccggacacaaaggccaagggttcccgggagccgcgggtattcagagccaggagaggggtcccggcgcggagggtgctgcggcccagcctcctggccacagagcgcgccggccgcgagggaggaccaaggtccccaaccacgcccgcgtccacccgtgaatcccggcgctcgcagcccccgggcggcgcagccgccaccgccgccgtcttctctggagcgcagaggggtgtgcttgggagggggcgggagggcactttcctctgtgtcggtgaaaggaagagcttccagctccctcctccgcacaaaccttcacttcctctcttgttcgatcgcgtcctaaaatctgggatcggcgacgcaaggacagcctggtttggcgaagacccctcggacaccctgcgctccggactccaggcgggtggctccacggtgccggccgggacgcgcagctcggggggcgggaccacgtccgggaccccggggccgctgtccgaggacggaggtcggtgacttgaaccgcgtcgtcctcagggctgtggcggggcccctctcccagccgtccagcccgcagcgcccagctcagcgcactgaggaccaaaaagggcgggagactctctccggccctaaaaggcaattgtgctgagattttaactctaacttgggggttcgcccgattccctggagcaacgcttctctaaaaccacggagcaggccagtgttcggaactgcacaggtagttacgaaggaaggaaatgaagtccctcgttccaacagcttcgggtccagtcacaagtttctctctggcgagcacgcggccgcctcacctggggtgggggaggcgctgagaaagcgcagttctctttgggggaggagagatggcctctcagaggcgtccccacctgcctctggaacgcctctccctgcaggccccctcggttccctgcaattcgccgcccgctgggatactcccatggctcggaggcgcgctcccggaccctggtgaggagggtgaagagcgccccaaaatgggctgagaggaaaatgcgcccacactggcgcctctccatcctggctgctcgccccttccctcctcctttcccacacgcctcccatctccgtgcctgcacccccccacccccagcaccctgcaatggtcggaactgcagggagtggggagcaacgcgaaaggccgagagaagagcgctggggagaagtcccggaggtcctagactccttggggcggtctctgcggggcgctgggccaggacagctgccaaccctccaaatctgtgcgctcagaaggagctgccctttgcccgctcctcctcacaggcccaccctagacccacttggggatgatcccaggcgcagctctcccctgccggcccaagcctttgacaggagtcctgcggcgaggcagagaccccctgaactgagctctccgacgccctagttgcccgttagagcccccatgcgcgccctccagccttcgaaagctctcttcctcgccccaccacctacgcgcctggtgatgctctcgtgggcccttcctgctccctccgcccccatcccagcctctctcgcctcttccagggcccacccaaccgcactacgagcgcccgcgccccgcccggcacccctggttacctgcagctgggccggcgcccagcgcccgcgcgggaggaggtgggggcgtgcgccgggccgagcggcctcggggcgcagcagctgcgggtagcggcagcgccatcatcacagccagctgcttccctgcgctggagccacagactagcggggtcatccgcttctgaccacaaacttctagggcggccggaggagacaaaggtgccgcgcgtcgctgctccagcagcagcggctgcgcggcggcacgggctcggagcccgcaggcgccggagctctgcgcggccgctcggcccagctccgcgtgctccgccccggcccggcccccgggctaggcacgctgggccggggcgcggcgcgggcgggctcagggcgggctccggacggtcccggtagggccgccggccgcgcgcgtagcaccaaccagcgcggccgccgcgccccgccttatatccggcccggcgcgcacccggccggcggcggcgcggctcgcggcccagccaccggttgctatagcgatgtccccccccccccccacatgttgctgacagcaattggctaaggggccgcggctctccaaacaccctctcccgcccgagactatgaatggacatcagctttgtcagtcattggtacaacgccgaagccagggccttcgccttttctttcttttcagtgtttctccctttcatcgttcatactgggcaagttcagggtagcaccgaggggagagagacctcggccagaaaagtcaaggcgcgcggctctgctgtgacctttgtcctgggaggggtgggtggggtgcgtcgccactcttggcaagagaaaattgcacggcatatcgttcttcccagttaccttttccagtgttgccgttcgggcctttttgctccctttccaaatggaagcaggccaatgattcagggcgagtagacgagagcccctctgctcactttaccagggtcctcccgagtgtttaggtcccgatgcgcgtagaaagtgtcttgcgagacgcggaactggtgagactttgccaccatttggtccaggccaatgtcggccgccagcccaaaacgccgaagggagacggcggtgaaaacccaggcgtgcgagctgcgtccttgcccttccccctacccaggtcaatggtctggcctagaccaccgctctgcgggcgaaaggagtggagcagaatcacaggccacgctcccagtcgttcgagcctgcccacataacccccggcccctggcgcagtcaggcccgcagcgggcgagaagagctagggtctcggggcgactaggaccactgagcacctcccccccgcgcctcccgcccatgctctctctccccaggccctggaccccgggccacagccacaggttggggcaccccggtgcgcggcgcccccgcggagctggcgagagccggagagctgaaacccaacatctgtgtgtacaatgcgctctccgaggcccacagctgcaggaacaaggagaagaaaggaagaggggggcgcagatcttgtcacacgcagatgacagtctgcggagggctctttagtttctccttttctggaaaccccagcggccccctcctaggcccccctctcccaccgcctggccattgttccctgcgcccgggacagctggagacggcggcccgcgccactcgacgcccctcccgccgcacacccggctgcccgcggcgcccgctcccggcccctccggggccaactcctccacaccccccacctccccaggccaggcccaggcggcgcttccacagtctcccctcccctcccttgcactctggcgctgcccctagacctgctcggtgcagagggccttgcctggcgcttttctctcacaaacctagttctgtaaaacctgggggcgagccccagggggcagggctcagaggcgggggttgtccacagatatgagtacggtgccgtccgctgcaggcccctgtctaaaagtggccgaaggaccccgtttcctctgactgcaggcccaggctgagttccgcatttatttttgtatttatagggcaaggccagagcgcttcataaagctccagggcaaagaagtggcctcgcatcgggccatggttcccgcaggcctgagcgggctgcaggaggcccggtgcggctcggcgggggcgcgagaggcgagaaactgcggcgtcactggcgtcctctgcccatgagtgaacccctccagtaggcggggacggggtacatcaccttggccctctcgtcccccctgcccagggcaaggcccgcaaaaacccccgcaccctggctcgggggcggcgcggcggcgggcaggtcagagagaagcggtactcgggttcccccagcgcccgggatgccctcccagggaccttctcgggcaaagagtcgagtggtagcggttcctgtccctccccgccaccctcctccggtgcctcggcgtccccagccaggctccagggcgaccccaggcccggccctgggcagagacagaggaggggaggggaggtggcgctggggggcggggggccggagacggcgggaggaggactcgggagccggggcgggaagaggggaagacagcggagagaagggacggggaggggagggggctcggaggaggggacctgctgccctcagcctggctggtaaccggcctctccatagcaacggccagcgcgcgcgtctgtgtgtgcgcgcgtgtctgatgtgtgtgtgcccgtggtgttcccgggactccccgcgggggctgggaggggatcgcagaaccctagggtggcgacagagcaaacccctccaggactggaggcccgacctccgcggtgctgggagcgccctagggtctggctgcgccgcgctggcgacggggtaggctcggggaacgcgcgcaggccccgggatcggccgctggggcattggggcatcctgccctcgctgccccgaccctcccgctgcggtcgcagggccttggggcaccggggagtgggcgggtcttcccagcgacccggagcacaggggcgggcgacggcgcccccaccatggccctgcccggcccgagcgcccggcgcacctgaggtctgggccggggagcagctggggaaccgcgcgtcgcctcggggagctcccggccaggccggctccgggcagaggccagaggggccctggcgcaccctccccgcccgcggcgacctcgcaccaccttccccgccagcccgcggctctcctcgccctggatcgccggagcctcatccaggctggggtctccagcaggcggccgggagctctccgaggtggccaggagtggccggtagccgtctccctcggccaggccgtgtccagcccctcagtctccacggcggcgcagaccgcacgcggccaccctgggcctcggacagggctagggggacgcagaccctgccgtctgggggtcctggggcggccacggggccggcgaccccagagcaaggcggagcctagtacaggccagagagctggttttgctttcttcacagacatgacctgacagtgaatacacaaataaatacaattcttttcgttagtcccttcttccgttgtctcagtgtttcacttccaacatcaaagcaccgcattcctgatttgatcttaatttaatgacctgtctttctagtgctttgaggaaagatgggtgggaggtggcaccaattcagttcaatttgggtcactttaaaaatcgtgagagggcctgaaaggttccatgcgggttcaccagcagaacagcacacttcctcgtccacgccttggtgcacctgcggcaatatattctgggtggcagacggttatttatgtctgagagcctccaactcactccccttcctcccaccacccctcctctaaggtgcggcctgacctcagtggggctgcagaactggcctcgccaaagctgaaggcggacccacactctaagccctagagtctaggggggtcatgagaagaacgcgtttgtatttgaggtgctggttcttttagtctattgcttcagaaactggtaagttactcgccagatttccattctatttttctttattttaaattccctttttatttccagggcaggaaaatgtatcttctaattcttgaaaatactttagaaaagtgtctcggcaataatgtgagactagattcagctaatttgaagaatgaataatgatgtgaggattttttcttttttcttttttttttggtcatgagatcttagacttcatttaataataaatttcaatttacatgatttcaataacattttcagagaaaacttttaaacatgacacaaaatatttttgagagacatgttgattgaaatcatttatatatgacaaatgagtacattattcatatagaagttagggttgtttggctgatgaataaaaaatataatatatgtaaaattctccaagacctacaaaatagctacacaatataaatagtttaaaaatgatttgttgatcctgccaatacttcttttaaagtgcatttcacatttgttatgtgtaaaacctaatgttctgtgataagaatctcattttcaatttaaggaacaccaaattgttatagattacacatttaagtgattagaataaatatcccatgcactaaattatcaaagaaaatgtatttttaaacaaaatagagaaagactgttatgggaaacatgattattataaagcaaaacacatatttcaggaatttaaaataatatggtaaggtagaaaatgatttaaaaaacacctgagactcttgatttcagaagtctaaatcaattttgttttttaaactaagacagtaatttataattttacagtacacaaatagtatttaaaatacttttgatttctaaatccatttttaaaaagtatttactattataatataaaaataaaaatagatccttaaaaatattgtaggtatgtgtataaggcatttcttcatgcatatatttaaagaaaacaacattttaaagtaacaatgagtgcattttgaaaacaagatgttttgagaggtcagcctcctagtaaagcatagtagttggcattgagataatttaagaacaaagacacttccacagacaaatatggatgactctgagttgaaatgtattaaccaccagtagttattttttcaaggacaatatttggaagagcatcagacactagtgagaagtccttattcatcataaaagaaggtaagtccattgcaacaatagggcagtgaaacaactgcatcttagtagagccctcaccgtctacccgtgcatactggatcttagtagagccctcaccatctacccatgcatactgggtcttggcagagccctcaccatctacccatgcatactggatcttagtagagccctcaccatctacccatgcatactgggtcttggcagagccctcaccatctacccatgcatactgggtcttggcagagccctcaccatctacccatgcatactgggtcttggaagagccctcaccatctacccatgcatactgggtcttggcagagccctcaccatctacccatgcatactgggtcttggcagagccctcaccatctacccatgcatactgggtcttgggagagccctcaccatctacccatgcacactgggtcttggcagagccctcaccatctacccatgcatactggatcttagtagagccctcaccatctacccatgcatactggatcttagtagagccctcaccatctacccatgcatactgggtcttagtagagccctcaccatctactcatgcatactggatcttagtagagccctcaccatctacccatgcatactgggtcttagtagagccctcaccatctacccatgcatactggatcttagtagagccctcaccatctacccatgcatactggatcttggcagagccctcaccatctacccatgcatactgggtcttggcagagccctcaccatctacccatgcatactggatcttagtagagccctcaccatctacccatgcatactggatcttagtagagccctcaccatctacccatgcatactgggtcttagtagagccctcaccatctacctatgcatactggatcttggcagagccctcaccgtctacccatgcatactgggtcttagcagagccctcaccgtctacccatgcatactggatcttggcagagccctcaccatctacccatgcatactggatcttggcagagccctcaccatctacacatgcatactgggtcttggcagagccctcaccgtctacacatgcatactgggtcttggcagagccctcaccgtctacccatgcatactgggtcttggcagagccctcaccgtctactcatgcatactgggtcttggcagagccctcaccgtctacccatgcatactgggtcttggcagagccctcaccatctacccatgcatactggttcttggcagagccctcaccatctacccatgcatactgggtcttggcagagccctcaccatctacccatgcatactgggtcttggcagagccctcaccatctacccatgcatactgggtcttggcagagccctcaccatctacccatgcatactgggtcttggcagagccctcaccatctacccatgcatactgggtcttggcagagccctcaccatctacccatgcatactgtgtcttggcagattcctcaccatctacccatgcatactgggtcttggcagagccctcaccatctacccatgcatactggatcttagtagagccctcaccatctacccatgcatactgggtcttagtagagccctcaccatctacccatgcatactggatcttagtagagccctcaccatctacccatgcatactgggtcttagtagagccctcaccatctactcatgcatactggatcttagtagagccctcaccatctacccatgcatactggatcttggcagagccctcaccatctacccatgcatactgggtcttggcagagccctcaccatctacccatgcatactgggtcttagtagagccctcaccgtctacccatgcatactggatctcggcagagccctcaccgtctacccatgcatactgggtcttagcagagccctcaccgtctacccatgcatactggatcttggcagagccctcaccgtctacccatgcatactggatcttggcagagccctcaccatctacccatgcatactgggtcttcgcagagccctcactgtctacccatgcatactggatcttggcagagccctcaccatctactcatgcatactgggtcttggcagagccctcaccatctactcatgcatactgggtcttggcagagccctcaccatctacccatgcatactggatcttagcagagccctcaccatctacccatgcatactgggtcttggcagagccctcaccatctacccatgcatactggaagcagagtttatcccacaggacaaattcatgaactgggaagatttttaagataagattttgccacattgcttatgttagatataacataagcaatgcaaatgtaagcagtgcaaatgtaagatatagctataaaatcaatgcccttattttaaaattgagaaatgctaaaattattttttcaaattatttcactttatttcaagaaaaatatgaattctttacttaaagcagaacaatgcaagtcattttttgttttgaaaaataaatcaccaacacaactcagcttttattattaattctcatgctggctcatatgccgatgaatctgaagcttttgaaatccaaaaataggaactcaatgatgagatagacttgatatcccaccaatggcttgacatgcttacatgaaaccacgtgcttataaaccaagtatgtgtttcagcaaacatttctgcttgaaggattggctgacaaatatgtcgggatgtttagacttttcttccccaaacttcaaagttataattcaaagaatagaaaaagcctcaaggcttcattattactattattagttttgtccattaaaagtagcattttgaaaaaatactgttcataagcacaggtacttataaacagtgcagtctccctagaggtgaatccggttttcactgtctagattctagtatagaggatctattacttttaatcaacgtatttgtaaagatctaatattttattatttacagaataatgccataaggcacgtatttaatagttgatgttcagtatagtatatatattgtattttcataactagattatattcttttcaaaactgagctaaaattccttagattgaatgtttgtaagaaagactcattaccacatgaacaagaatctaacttttttgaaaatggctaaatagtgccattatgttcagatgaaaggaaacaagataattctgtgaagaataaccaggtcatctctatttttgtttaaaatctctttcacatattttgtcagttacatactacacatccattacaatatttggaaacttttcctcgggttgctttggaattaaaagtagaacaataattcaggtaattcaggtaaatgtttgtttcacaattatataacttagccatgtcctgttcacatattctttaagaaaagtgcctatgtatattttaatgtatgaaaataggctccaattaaatgaaagaacagcaacagcctgacaaagctcacctttgtacctggattctactgagaaggaaaatcaaatgatcaccatcaagtgacattttttgattttatattgcaaatatgtctatacatatttagatctaatgtgaacaaaaattcaggaagcagccagttgcttttcttttcttttttttctttttactgagacggagtcttgctctgtcacccaggctggagtgcagtggcgtgatcctggctcactgccaaccgccgacacccaggttcaaatgattctgctgccagtagctgggattacaggtgtctgccaccaggcccagtgaatttttttttgtatttttagtaaagacagggttttgccatcttggccaggctgttcttgagctcccaacctcgggtggtctgcccaccttgagcctcccaaagtgctggaattacaggcgggagccaccgcaccctgcccagttgcttttcattctgacacagtgcggagcaggttcagggtaagctgtcactgagacggagcattggtggtgcaggattccatgtgactcaccctcagctgccaagtggccaactgcatggagccgccgcatgtcctcggtcagtgcggtgggatgcacgctggcattctagcaagtctggcacattagcatataatctgcaacagggtgctgtcaggtactgagaccacttttaaaaccctcatgaatctgccacatgtaactatatgtctccctaatatgtttccattcacacactttaggaagtgatatacctacttcgaccttgctcagtcatttctgaaattcccatttggaattgtcttcagaaatatgcccaaagaaaaccagaaatctagtcttacgttttctaagctttttcacttgtgattctccacaccttaacctcatcactcctccagttgactgtccttgtctccaaatggctttagagtattaaaaaagaaacaaatctgaaatatcacttccaccattaagagtgcatttgaaaaggccatttcaaaagagtagtgccccagacatggtgagcactaagacagacagcacctctgagtgacactgcggaaaaaccaggctcacttgtccaagcacgttcgcaacagagtcagttacttttcctccactgggtttcccagtttccatgacgacagcctgtcctgaatgtccatctttggggtgaggcttgaggcttccttgtcttttgtcctccccacaatcagatcccattacttttttcgggtcatcccttatctgaccttattccccatccccctatgctgatggcggctggcctcctgcagtcctggggtctggtcccctccatccaccaccctcagcctcggccatctctaccttgtccactggaacagcttcctgtccctccctgaaaattccaccaacccttcctcacacccatcagaggctggctccctttcatctgatcaaccaaggacacacaggggcgcctccagacctcccctgcatgccttccccacaccaggagcccctggtcagcggccgcgagggcaccctcaccctctcctgcacactctctccccatcgaggaaccctggctggctcagcggtgggctcggggcctttcatttgtttgaggtcgaatgctgagtccctcaccttcagaacatgtgagtgctacggactgctcatcatttcacgcatgtgcacatgcactgtctctcacacacgcacgctttcgcacacgtggagacaggcgagtactttctagtcagcatgacagcagcggctccatcctgtcaagctactttcccatattttatttcctttcactcccagagaaaccgtggaattcatgcatttttttttccagttttacagatgagaaaaccaaagtactgagaggtaaatgaagtatccgaagctggtcagtggcagaatctcaatcaacacacaggctcctatgcgaacccacacactgagggcatgtttcacaggggagagctccgttcttagctacagactcaggcaggcttggagtcactcctctctgcagtctgagctccgcgggtctccgccagagcctccaagcctccccccagtaataatattaataatagttactattctttgaatagtaattcaataatagtatcagtctttcaaaaagatggtggtctttattctctattttccatagaatgtggtcacaggcatcgtgtgagcactgccatttctgtgcttctaccacacacactctaagaggccagggggtgtctgctccggcagctccagatgcaccttccaggggcgtctcctcctgtcactcagcgctgcccccagacccttcctacccgaagttctgtggccacagccatgcagactttatcctacactctgacccactcacaaagcactgcggttctaggtatgaaagcttctcactcttaactgacgtgggctgtgcgtttataagagagccgggtcaatgctggtgtaactgacacgggctgtgggtttgtaagagagccgggtaggtgctggtgtaactgacgcgggctgtgcatttataagaaagcccggtcggtgctggtgtaactgacacgggctgtgggtttgtaagagagccgggtaggtgctggtgtaactgacgcgggctgtgcatttataagaaagcccggtcggtgctggtgtaactgacgcgggctgtgggtttgtaagagagccgggtaggtgctggtgtaactgacgcgggctgtgcatttataagaaagcccggtcggtgctggtgtaactgacgtgggctgtgcatttataagaaagcctggtcggtcctggtgtaactgttgcgggctctgcctttgtgtgaaagcccggtcggtcctggtgtaactgacacgggctgtgggtttgtaagagagccgggtaggtgctggtgtaactgacgtgggctgtgcatttatgagaaagcctggtcggtcctggtgtaactgacgtgggctgtgcatttataagaaagcctggtcggtcctggtgtaactgttgcgggctctgcctttgtgagaaagcccggtcggtgctggtgtaactatgagaaagcctggtaggtgctggtgtaactgacacgggctctgagtttatgagaaagcctggtcggtgctggtgaacatgggtgtctcccctcagagaagtaagctgaggtgtgtgcacctctcacagcccagtggggagcacagggctgcctgcccacgctcactggctggctcagtgccctccataggctcctgtccaccggcaggcgtgctgcggcgttggtgagagccccggggcggaggctcaccatcaggcttccagcatatggtggataataatctctggcaacacaaaaaggcaggcagcagctcagctcactgtttcatctgttgatcagtctacaggtccagggttttaaaaatggatttttgctaaatgaataccacaacatatgccaccagaaaagtgcgtgtgtgccatttcaaacacccgccgtcctgctgctccgcgctgccgaatctgctcctctctcctctggccccgcgtccctcagaaggagctgaggtcagaaggaggtgtctccaggaaacactaggggaccttcatacctgaggggccaaaatagctgttttcaagctgctgctgttggagaccggtcttaggaaggggctgtgatagagctctttgtggaaagccttaaattaagatgaaggggagaaaaggaagtatcgaaagtttggaaaaatagagaaataagaagagctcctaaactgagcctgtggcaaagggagtatcctgaaattgaacgggctcattcttgaaatgtcagtgtggccggcagcctctgagacggcccagggcctccgtcctcctggaattctctttcctgagcgccactggacctggtgactccactccgatgcctggaggacagcaaaggcagcagagatggctgctaaggacgcacactggggtccccgaccgactttcgagctccgagggatgtctgctgccaggtggtggcggctgatggggaaacctggtggacagggcccatggacaggggctaacagcacagagggcctggggctgccgctgctgagctgagaggacaccctcagcacagcctatagggacgcagctggaacccccagctggtccacaccaggaccccaggcccacagaaactgtaagataaaacatggttgtgttaagctaagtttcgggataactcgctgtgcagtggagggtaactactggagctagcaacgtcaagccgtccaggagagaaccagatgggaacacccagcgtgggtcttccacaaaagaacttcttctcagccaggcagaggcacctgcaggaggtgaaaggcaagttcccggccagcctggtggggttcctgcggtccaacccccacctcagcacgctcccctcactccccgcggccgcttgtcctctgccgctgctctggatttgggattccgagactggcaggtcaggaggcccggaaaactacatttgcctcactctggttctccggggctgtggtgaggctgcctctcccctgccctccactttctctttccctgtaatatttatgtagctgagtgcagcaaacattttgaatgcgtgatcaccgtggggctcagggccctctgaagctctcactcgcccaaagctgacggcctctgttttttccagctgcagctccgggtgccatcctccgcggggtgaggtgccaccaggaatccctttccttagattgtctgatgctgtgagttagaagattcctgtttctactcacacgattgggtgcccagtatacactgccatggtttagaggaagctctgccactaactgtgtgactgaggcaagtggcttcactgccctgtgcctcagtttctctccctgaaaatgggaataaaatgtacttgactcatgggcttaatgaactgatcccgggagctcttggctgtaaggtgctcaggacagggtggcatccacaccctcaggggccctgctactttttattaccatcttgactctaggagctccgaccttggttttcatggatgccaatggaaattctgttttcagacaaatgtggaaggcatccttaaagataataggattaagtaacacaaatataaagaggaaaaatgatcaccgatgaagagtgcaagagaccacgtgtgtgtgcttgggaatggagggcctgaaggtcccaccctcggctgggcccgccctgccccatgctgctcccgctctcctgggcaccctaccacctcctggctccccacattcgcttctgggcacacgtggagggagggcaggtgcccctcaggtgttccctttctttccttctcagcacctcctgaggaagccccaggacagaacaggaaccactggagtcagaagcagaatgaggggcatctgtattcactgcagtttacggcggccattctattgctctcgtaacttgcaaagcagacttttaacttagaattgacatatactaaatatttaaagtaatcttcataagccccagagtgtgtgtctgtaactaaggacaattttttcacaattaaaaaaccctcatgaaatgacagtgactgttatcaaatgtctaactctgtgctcgagcactaacctccatgcttgcaggaaggctctttgtgaaactgacaataatcctgtgaggtgagcaccattaaaacctgtacttggccgggcgtggtggctcacgcctgtaatccagcactttgggaggcccagggggcggatcacgaggtcaggagttcgagaccagcctggccaatatggtgaaaccccgtctctactaaaaatacaaaaaaattagctgggcatggtggcatgcgcctgtagtcccagctactcaggaggctgaggcagaagaattgcttgaacccaggaggtggaggttgcagtgagccgagattgtaccactgcactccagcctgggtgacagagtgagactccaaaacaaaacaaaacacaacaaaacaaaaccctccattttccagacaggcaaatgaagcccagagtgacaaggtaacctgcttaaggtcacacagcaggaggcgaggcagggtatgaattgagtgaatctgacgccagagccttctggatcaacatgggccacattcccccagaatgccaggaactgagtgaatgtgaccccagtgccttccagatcaacgcggatcacatcccccagaatgctgggaattgagtgaatctgacccaggtgccttccggatcaatgcggatcacatcccccagaatgctgggaattgagtgaatctgacctcagtgccttccagataaatgcggatcacatcccccagaatgctgggaattgagtgaatctgacccaggtgccttctggataaacgcggatcacatcccccagaatgctgggaattcagtgaatctgacccaggtgccttccggataaacgcggaccatatcccccagaatgctgggaattgaatgaatctgacccaggtgccttccagatcaatgcggatcacatcccccagaatgctgggaattgagtgaatctgacccaggtgccttctggataaaggcggaccacatccttccagaatgctgggaactgggtgaatctgacgccagtgccttccagatcaatgtgaccacatccctccagaatgccaggaactgagtgaatctcaccccagtgccttccaaatcaacgtggaccacatccccctagaatgccgggaactgagccaatctgtcccaggtgccttccggattaacgtggaccacattcctccagaatgctgggaattgagcaaatctgaccccagcaccttccagatcaatgtgcactacacccctcccaatgccaggaactgaccaaatctgactccagtgccttctggattagcgggaaccccattcctccagatggtgggaactgcgtgaatctgacgcagtgctgtctggattagcgtgaaccccattcctccagatggcgggaactgagtgaatctgacccagtgccttccggatcaacatgcactacatccctccacgatgtgggaactgggcgaatgtgaccccagtgccttccagatcaatgtggaccacatccctccagaatgttaggaactgagcaaatctcatgccagtgctttccggatcaacagggaccacatccctctagaatgccgggaactgagcgaatctgacccaggtgccttctggataaacgtggaccacatccttccagaatgctgggaactgggtgaatctgaccccagtgccttccagatcaacgtgaccacatccttccagaatgctgggaattgagtgaatctgacccaggtgccttctggataaaggcggatcacatcccccagaatgctgggaattgagtgaatctgacccaggtgccttctggataaacgtggaccacatccttccagaatgctgggaactgggtgaatctgaccccagtgccttccagatcaacgtgaccacatccctcctgattgccagcaaatgagcgaatctgaccccagtatcttccagatcaatgtggaccacatccctccagaatgccgggaactgagcaaatctgacccaggtgccttctggatcaaggtggaacacatccttccagaatgccgggaactgagtgaatctgaccccggtgccttccggatcaaggtggaccacatccctccagaatgccagacagatgaaggacacagaaaacttaatagtaaaacatattttctgatacgcaggtacctgggaatctatagattcaggtttagtgctgtgggttgtccttttatacacagcacacataccacaaacacacacagatacagcatacacgcacacacacaaccacattcacatagacaagtacctcgcacacacatacacagaaacacacacaccacacatacacacagacacatacccagcatacttacacacacagcacacacacaaccacattcacacacacataggcatatagtaaacaccaactcaagcacacatcacacgtgcatggacaccccccccacacacgtggagatagagtcgacactatattagcttcccatgaattgatgtcataagctcagttaacatacgtgcccgctaagtacccttcagggatggcaatgctaacccgctgtagtttaaaagcttcagggaagacttgatcagtctcggcaggtattacaggcagaggcagatttctttttcctttttttttctttttttttgagacagagtctcactctgtcactaggctggactggagtgcagtgacacgatctctgctcactgcaacctccgcctcctgggttcaagtgattctcctgcctcagcctcccataatcccaattgggattacagttgggattacaggcacgcaccactacgcccagctaatttttgtatttttagtagagacggggtttcaccatgttagccaggatggtcttgaccttgtgatccactcgccttggcccccaaagtgctgggattacaggcgtgagccactgcgcccagccagaggaagatttcttatgctgcttttaaaacaaaagtagccacaagagttaacatttctagttttaactctcaaaaataaagtccttgtggattttatgatctcatttcagcaaatgtcactgcaaagtggagatgctatcatcccttagcagtgtgcatctgccttgggccgctggggccagccgctggctgctctgcaaggaagggtccctgtaagcaggacagtggccttccagggctgaggctggagaaaggtgctttgcctcggatgggcaccctttcttttagctctgattctgccccgtgccgtgtgcctctgagtgttgccttcccttctgaagctcaggcacatcctctcctctgctgccagctccctggtgccagttccctcctgcttccattccctgccttccaggcggggtgccaccctgtgtccccttacgattatctctctgcttgtgcaagcatcaccatctgcccacgacccttcagccaggacctgcagcactcagagctggccacagagactcgttccttccacagggactgtccagatcatcctaaaggttgggcagtggtgtgagtggctctcggccattcaggagtacctgcaggtggcagaaggtactccagagttggacggaggggccgtcccagggctctcggtgagactgagaaggttcatgagctccgtgttcctgtctgagatgaccagaaccagggcaggcctcatgtgtgccccaacttccgtaaaaccacacatgcatagtcacaagcggctccctgctttatgcattctaaagcaattcagcattccacatgaaaacgcagccgtgacggcactgtgtgattgataatgctctccgtgagacttacgggtccataaaccaaagaatggctataatcacccacaggtccatcatttctttatcctttacatcaaacatgagatggtcatagtcacaattcaataacaagccacgtatggctccatgaaagccaccagtgagagctgaacgtgctctcccagctactcttctctactagagcctgcaccccaccgactttgaaaagagataactgtcacctgggaaccgacactcctgctggggaggggaagccacctggggctggagactacagtctggaccctcaggcggcagaggagcgagccgagagagacaactgtggcttctgcctctcccagtgggagtgaggcccctggtcagagggcctgggtcgggggctgtgctgcccatggctgggtgggattttaatctaggctctcacaggtggtcacacagagcggccctgctgactcccatcaggggagatggaggccatacgtgccacagatcaatacgatgcccttccatgcacagctctggacaaaagctcctcctgggcatagtgtctgaaatgagctgcttacttttatttccaagaaaatgacaaagacgattttgacccctgacaattctttcagtcctggtcctcctgcgggtagctgagagcctaagtgaggtgtgtgggacagaatgaggtgctgggaaattactggcagtggacatttaccactgggttactcggacatctagagcacgaagtgagtgacacagaggccggggaccctccttccctcccaagtgggcacccctctgagaaattccctgcgagccccccagctctgtcttctatggggacttcgacctcgctccacgttgtgcagccacatggcccacaggaatgggcggtcctgctacatgggaaggagcttagggtttaacacgcctgctccaggagctgcgccacacacccgccttcagattcagcccggcgtgcctgggcttctgaagtcccagagcactcagcccggcccatccacggatggctgggacagagatttacacatacaagtcggatattctggggagctggaattcaaggatggacaatgaaagcccagagacagaatcctcatcagtgagcagacaaggctctggcagggatgttttgggggagcagtggttccttacaacgtgagcctgaaggagtttccctcacttagccctcagctgggggcaaaccgtggatgctggagagaggagcgtgaggcatacagaggcccaggtggctctgtgggggtcggacgcatgggtgtgtccccaccacccacagaagggtgctcgcctgagacacagggtcggccgtgaggacacagtttcaggaagcatccacacaaggggaacccacagggcacttgggttatacgaacctaacaaagagctaaaatctgagctctctccctcctgcgtccattcgatccccttggacgaggctttctggaacgtccagaataaagagaatcctcatttctcagcacacggacttctgatgtgagaagacagtgactgtgtgctcattaaaactcactcttggccaggtgtggtggctcatgtctgtaatctcagcactttgggaggccgaggcgggaggattacttgggcctagagtttcagaccaggtggccaacacagtgagaccccatctctacaaacaataaaaaaatcacccaagctgcctaaccgcccccacccccccgccccgtggcacaggatgtttcccagggcagagagtgacatggctgcggggtcccgctgcagaagaaccctgtgcagtgagggccacaggcctgggaccccaagccgctcaggaccgtgcacagctcccagatgtcccctggggggacatctcttccggaggatctttagggtccctttcagccctgccatctgtacgcccaccatggactggtgcctactgcctgccgcctgggcacaggtgcccttgcgcctggccctcagcccgcccatgtgcaggaggggttccggggcagccgggttacacgcgagagccccacgcgccggaggttccggggcagccgggttacacgcgagagccccacgcgccggaggttccggggcagccgggttacacgcgagagccccacgcgccggaggttccggggcagccgggttacacgcgagagccccacgcgccggaggttccggggcagccgggttacacgcgagagccccacgcgccggaggttccggggcagccgggttacacgcgagagccccacgcgccggaggttccggggcagccgggttacacgcgagagccccacgcgccggaggttccggggcagcccggttacacgcgagagccccacgcgccggaggttccggggcagccgggttacacgcgagagccccacgcgccggaggttccggggcagccgggttacacgcgagagccccacgcgccggaggttccggggcagccgggttacacgcagagccccacgcgccggaggttccggggcagccgggttacacgcgagagccccacgcgccggaggttccggggcagccgggttacacgcgagagccccacgcgccagaggttccggggcagccgggttacacgcgagagccccacgcgccggaggttccggggcagccgggttacacgcgagagccccacgcgccggaggtccggtttgtgcacctgcacacgggtcctgtctgtgctcccctgcagcccgggggagtcctggcccttcaccacgtgggaggctgtcctgggacctgaggactccgcccacactccatgccctccttcccttcctcaggcccacctgaccccggcagacctcctgctctcctctttgtcttctggccttgcaggcagctgtctaatgcagggcctaggcctgaggacaagcccccggggtggccaagctggctgcatccctgggaccctggtctccgtcactgggacgcagcagttctgccgggttaacctcagggggcatatgtgtctctcccatggccgtcattttctaccgactttgttatttcagcattcatttagtgcatatattccttttaagaggtgtctaaatccttcgtgggccacaacagggtagacatcaggggctgtagcctccagtgtctggggggccatgcaggccacatgagtggggggaggggctgcgtggtggaaggggggccgggcagctgggggcaccatgagtggggggaggggctgcgtggtggaaggggggccgggcaggccacatgagtggggggaggggctgcgtggtggaaggggggccgggcagctgggggcaccatgagtggggggaggggctgcgtcgtggaaggggggctgggtggctgggggcggccagtcctaccccaaggggagagcacacaggtactgctggctgggaatgcgggtctggggttgctcagatctttgattaagaaaatagaaatcaggcatttgtattatttatgtaaaatttctcaattttgaaaaccctcattgagctcttagagtacaaactgtgtcccctcaagaggatatgttgagtcttaaccccaggacctcagcatgttatgtaacttggaaaaaggaccttcacagatgtaatcaagtgaccacgaagtctctggggtaggccatgaatccagtaggactggtgtcctgatcaaaaacggaaatttgaggctgggcagggtggctcacgcctgtaatcccagcactttgggaggctgaggcgggcggatcacctgaggtcaggagtttaagaccagcctgaccaacatagtgaaaccccgtctctacttaaaatgtaaaaattagccaggcgtggtggtgggcacctgtaatctcagctacttgggaggctgaggcaggagaattgcttgaacggaggaggtggaggttgcggctacccaagattgcgccattgcactccagcctgggctgtgagagtgaaactccatctcaaaaaaaaaaaaaaaaaaaaaaagggaaattcagacacagacagacgtgcacagggagcgggtcacacacagaggcagggactggagtggggcagccacaagccgagggacactgggagctgtcaggtgctggcagaggctggaggaggagggagcacagcttcagacatgctctcagacttctggctcccagcactgtgggagaataaacgcctgttgtttgaaggcccctaggttcatggtacttggtgagggcggcctcgggcagctcacacatgggccacacagaacgtggctgtgggcgggattgttctgggtgagccatgcgcatcccctgctatcagcaacacagtggactcacactggctctaaaacccctgaggtcgtttccatctgatggtcgcacttgggcagggctcttctggtgccagcgggagaccttactcagaccctcatctccatccacccctcctcctcctagcactgcatggtccaaaagtttactcaacccaatgacgcatctttaattctattattgacaacatcgtggaatataacagaattgaggaatagccccacggcacgtttctagagaacccctttgcacttaatctattttctcctcattaagtaattatttaattaatagcctgtaagaatagtgtacgtaggtagaaatttatctaacggcatgatcgttccaagtctctatcttttcttttggatactttgtaaaaaaaaaaatcattaaaatctatacttgtgatgtcaacagccgttcctccatctctcagcaagaaatgccatcagcaaagagacggtgtgacgcccggctccctccccgtcactgatacggcctaggatctcaccagggaccaaggcaagcacactggtctgcggttcccacaatctacctgtaaccctttctgaatgtttgtccaactctcttattccggcgtctttcccaactctgccaatccctcagacattcccgacagctgtggccagatccagctttgctacggacacggagccacagaactggtctggacatggagccacagaactggtgagagccccacgaagcagctctcgtgggctgtgccctccagccctcacatggcacacacctgctgctctgcagagcacgcctcgctccccttcacgaaggagcggaaatacaatggcagccgcgaagctctggctactaagatgcattatctgctccaagctttcaattgagtgattatgtcttaaaagaatcacataaatgatacagctccacattttgaggtgtgtaaagccacgaaggcatcgtcttctatatcttattcttgctgactatatgacgatgacattcttaggtgagctcactacctcatggcatcaactctgcagagacgtctcacaggtcacgttagaaggctatgaaaaattaaaacacataaaaaacaatgtttaaacctgtgtgcatcactgagtttgacagacacagtgtatggatgccagattagttcgttttactgtcagtatagtacagtccgttaaactgcgcatctttgatgagttactacctgtggggtggcacctgacccaggccaggacagtctgagtggtccttcctttcgccctgtgcagggctgggcttgcgacctcagtctttcccggcagctctgcttggcagaattgagggatgtctccattttatccagggcgagctactataggaataacaatggaggcttaagatctgtagaaaaatctatgagtttaggaattgtgattcctgatttttattgagtaaaatgctcaccctaatttcttcaacagaaaatcaatattccaaaccctccagaaatctggtatttgcaggaatcccgacactcactaacagaggtggcacaaaaggccctgaagtcagggatccctggggaacgatgcccagtccgacgtgcttctcctgagccgattttgggtttcccgttttctaaagccagctccccagggaacggcgcccagtccgacatgcttctgaaaggattctaggtctcccgctttctgaagccaactccctggggaacggcactgagcttgaggcgcttctcctgagcagattctaggtctcccgctttctgaggccatttccccagggaatggctccaagcccgatcacttctcctgaatgtattctgggtctcccgctttccgaggccagctccccagggaacggcgcccagccccatgtgcttttcctgaatggattctccgtctcctgcttttggaggccagcttcctggggaagagctctgagcccgacgcgcttgtcctgctttctgagcacttgaatctggtggcttctgtgtcatcttcactctgaatgagtgaaatgtgtgcttaaaatggccttgagaaaagcaccccctgcagggtgggagagaaataccgacaggtggggagggctggaggcgggagtccaggccgtgcgcccaagaggagggtcgtggtgggaatgaatgaggcccagggagtgttgggagacaggccggcggccgcgggaaacccctcagcaacctaccagcacagatgcaaggacactggggtgccagtccccccgctaccataaaggaagaagaggaaaacagaatgaggcaaagtgataggggatgaagggcatgaggaggctgctgtgtgctcgcagaggaggggaggcccccggttctgcttggcgctggctactcttcttggttgttgttttctaagtgctgttgactgctggctggacctcagtgaatgacccttctgctaaagctgccaggcactgcgctggtgtaagctgatcatagctccatcatcccaaatctaaaccactccagaaacaggccggcccctgctgcaacagcaagttgatctgtgactttgggcaaatccactcagcgccagactgccaagagaaaacggcggtctccgccgtccaagcagcacatcgtggagggcctacacaccccgatgttctgggggagcacttacatcttcagcaatgcctgtcaagatggagacagactcctgtgctgaggttgcagggttgcactctgaaaagacacccagggcagcactccaggcaggctgcatgctccggggagacacagatggcaaggagcagggcagcgggcggcctggaggtacagctacaccagctctggggttccacgctctgatctgacttagctgttttccaccctaaccccatgtgagacagccactgccccaaaactagggatgggaaccaaaacctttgagaagcccacgtgggacatgggatggcctgtgacccatcagctcccgggccatccctttgggttcagccacaggctgggggtgggaggtggtgccaggacactgtgggcatcgccttgggctgaaaaagggggctgtgaggaactcatacacctgagtcctcgtcctaagaagtcgcagttgttgggtgggccatggccacgaagactctgcgggaacactgcctggtcacacagactctgcaggaacactgcctggccacgtagactctgcaggaacactgcctggccacatagactctgcaggaacactgcctggtcacacagactctgcaggaacactgcctggccacacagactctgcaggaacactgcctggccacgtagactctgcaggaacactgcctggccacgtagactctgcaggaacactgcctggccacgtagactctgcgggaacactgcctggtcacacagactctgcaggaacactgcctggccacgtagactctgcaggaacactgcctggccacgtagactctgcgggaacactgcctggtcacacagactctgcaggaacactgcctggccacgtagactctgagggaacactgcctggccacgtagactctgcgggaacactgcctggtcacacagactctgcgggaacactgcctggccacgtagactctgcgggaacactgcctggtcacacagactctgcgggaacactgcctggccacgtagactctgcaggaacactgcctggccacgtagactctgcgggaacactgcctggccacgtagactctgcgggaacactgcctggccacgtagactctgcgggaacactgcctggccacgtagactctgcgggaacactgcctggccacgtagactctgcgggaacactgcctggccacgtagactctgagggaacactgcctggccacgtagactctgcgggaacactgcctggccacgtagactctgcgggaacactgcctggccacgtagactctgcaggaacactgcctggccacttagactctgcaggaacactgctgttacctctcactgcacggggactcacagacacaaagatggtcattcacagcatcaccaaaatcgatccacgaggctttgagaaaatgcatctctaaaaaaagcacatttggtgggtccaacaagcctcacttattcacggtcctgaactcagtgcatggaggcaagaggcatgtcggtgacccagtgagggaacaactgcacatctggggcaacagcctgatggtgccgtgggagccacgggtgggtatcctgcaaacatcagcttggacactcagcacctgcatgggacatgcatcgccacaaggtcacaggtgggcacctgggtgctgcagggtcagctgacttagtcaaaggctaagcctgcagtgagtgtccgagcctgcaattgaccgcggaagccagtgccctccctagttggcaacgttgttcagctgagctacagagaaagagctcggaggtctatggactccttcatggaaatcgctcccttgcgtctcctcatgtggacacagctccacgcctcacctctcaggccaggcagcggccaacccagcctcttcaccaggtatgggcaccggctgctccttgctgcaggaccgctggctggggtggccggggcacgcagcaggcacatcccgacctgcgggccagcacctgcgccccatccctgttacacctgttctgaagccttcaagagcaaagactgatgttcatcatggccaaagcagctgggctctttactacggaaggagattaattgctaccccgcgtacctttcagaggtttatatgaagccatttttcggtatttctctaagtgactgaaacatgcgcagccatttcatgtatttctacgcgtgtgggcaggcggccagggccctgggccacattccccagaaagccacgtctccactctggggaggggaatgcttcgtttttctgtgagtggtgaggtctctcttttaacctgttataaattaccttttgtaatctctcctaaaccattatatagaggagggaggggagacaaagaataaatacatctgtaataaatgtgggatttgggaaagatgataagatcagaacaatttgaatgaacgtggcaaatgaatttagagtttttgaactatcagctatttctgcaaataatgacttgtagaaggagaggctatttttaaaacaattcatgttctctgctttcatgtgaaggaaataaaacaaggcactcatgaatgagctcttcaagcacggactttcctggagctcacaggaaggggccagcacaggtcaggctggaggcacagtctgattctacggtggcttcacagggcgtgtttggagagcgccttcctcctcccaaccctgcagtccccggcctggctccaggtctgccccgcagccctgaggtgagtctcagcatgtccaggcgtctgaggtgacactgcagcctctctccgtggccctgtggtgagtctcagcatgtccaggcatctgaggtgacactgcagcctctctcggtggccccgtggtgagtctcagcatgtccaggcatccgcggtgacactgcagccactctccatggccccagggtgagtctcagcacgtccaggcgtccgcggtgacactgcagccactctccatggccccggggtgagtctcagcacgtccaggcgtccgcggtgacactgcagccactcttggtttctcagctgccgcaatcggtccttccagtgtccgacctctggggccctcagacccccaaacccaccttgtcgctgtggcctctccgcctcctgcaggtggcagcgctactgtagcctgccatgccccaccccttgcctccatccccacacattgccctgtttcttgggcagccatcttctggacctctccctcctgcaggcgtctctggccctgggggctccaggagggggtctccccaggagcgtgttccccagtgcatggcccctgtcctccaacacctgctcaggcctgcagccaaacccacatctcccattcctgcctctcctgagcaggaagccccatgagagggtccctttacaattcgtccaggctggccctgggccctgtgtggccgcaggtggtcacggaagccccacctgagcttccaggcccctcgtgccaggacttctgaaggttgtgcctgactcacgtctccattctcgacccattaaagggggagcggagatcgtgcttcccaagggaccctgaggccttctctctaggtctgagaagtgggaagtcccccattgggagtggaaggccaaggccacagcactgccgtcatgcgctccagagaaaggtcacctgccacccttctgtgtgcttacatgtctgtcaggacagcccggctccggccatgccctttgcacatcccggcctcctgggaacgcggagaacttcgtgcctgctgtccagttcttggcatccgggagctccagctggcatgaaggcagaaagaataacagccagtggcagtggaaggcatgagcgcccccggagagcagggccagaccatcagcagggcccctccaagaggagctctgtatgccgggggagtgggctcggcccgcgggacaaggctgaaagagctccccagacccctctctgaagacagcctctgcaatctccggccttcccgcagttgcccgcgtactttcttcattcctcaaaggtctcattaatttacagtctaagtggaccaagagagatgttacatatgttaccaggaagctagcatgttcattaattaatttctgtctagtcatccaatatttattgagtccttaagtctgaggcattataatagttactgctgtggggtcatacagataaataagacatggttcctatttctcagactcatcacccactggtaagacagccaccgatggaaacgactccaatcgactggaaaatagagaggaaattcctttggaatttaggggaaagaataagacttttggctggggtgtcagatattcgcttataggagcaatttcttctcagctgcatggcaccaccagggaccaggccccggggccagtccagatatctgcagtgttagcgagagacgctgttgacccttcttggcttatcatggaactgaatttccttaggttcagttggtagctaccctcgccccatcatgccgcggtgacactgcagccactcttggtttctcggctgccgcaatcggtcattccaatgtccgacctctggggccctcagacccccaaacccaccttgtcactctggcttctccgcctcctgcagctcctgctctgtgtttgggaacgcgtgcggcccacaggacaaagccttgttgcacacccgggtcaagggcaaatcccagctgcacagccgggtgatccagcggccgaccctgcttccctgcgtaggaggcctgagccaaggacactgcggccccggctgcaccgatgcatgggtgtgcacgcggggaccgagggagtcacgtgaatcatgtggcttccacgagctacctcttcccacaccaggagcaggtgccctcgtctccatcaagcgctttctggggagaaactccttcaaggataacggcaaatggtgagcgtgcctcactctttataatagaaattacaaaaagatggagaaacaggcagaatcccacccattcctgtggcaaagccgagaccctcatttccagtctttctgggacagcggagccctgggcaggggacaccgtgtgactggctctagctctcctaaaacacgggacgcaggagtgtttcttaagtgtgacaaggtgaaagcccctcgcgagttgaggaaggtctcattacttctgacagaggccccatgttggggaggtaggtgtgggggctcggggaggtgtcaggacagcgggatggacgtgggtccacagagctgactatcacagccgctcaggatgcagccgtggtgtgtgtgctctggcctattttaggtacagatataaaacagaagacttcggggcaaaaggaagtcttagaaaaatataaaggaatagaaagaaacagctgttccccggcacagaaaattcctgctaagaacacacaacgggcacggtgtaggcccattagtgttgctctgggtgctgcatccacaagggagatttgcttcttcagaaatgtcaggggtgcctggtctgcaaggggcttccctcgtcggaaagtctcccatccacatcccttcatgtgccatgttcgcatcatgagcaatgttgtaatgaacagccacgcacttcattctttgcacatctcaaagaattgtgtccttaggatgaagtgtcaggggacgagtgtccatgccaaagcatctccacacgtcgagagcttcggatgtgcacagctgcgttgcctcctgactgtcagccgagcccagcgtcccaccagcaggagccacagcaccgctgtctgttcccaccgatgcccagtgtcagcgtccactgagtcgcagctcccctctacactgggtgtgcccgagcttgctgcatgggaggaaggtggctgatggcaagggtgtgtgtctcgacactgtggctgcagcacggtttcctcacagatgtttggggagaggctgagaggacctgcctgccctggagagccgggtttctgcctagggctcctcctgtgctcctgctcccaccccaggggcctggggctcccgctggaggatggtggctttgcagacccttccattttattcatcgtgttacagagcattctaaacctccttccttctagagtagaggctcaggggttaagggatatgtgtcttcaaacgagaacacttcattcaacagacttttcccgaagaccacgtgctgtgcgcagcctgacatgtggtgctcggccgcaaaagcgcttcagtctcgccccccacccccggagcagccaccaaccaagaaacattgtctgtatctggcagcatttggtccctgtcatgaggttacagtgagcccctggcccccaccctcacgtgtctgtgaggtcagctccccacgccctggtcctccccacctgcgaggaggctcgtggcacccacttcacggctggtgggaagacgggtgagaccacgtgtgccatgtgcctcatatgctgcctggcatattttgggtgctcacgaatgctgactgcagcctggcattgggaagggagtgatcccgccagggaggggaggcctgacagaagacatggtctctcagggggggtcctgatgtcatgtcagatggagccagggccaggggcagggcgggggtgcaggggctctcgaggcagaacctgggacccagcgcccatgtcggtgcagttgggaaaggtgcgtggctcccgtgggtggtgcagacgagcagtgaatgaagatgaagctggagtggcagcttggcccagatcctggaggctttgcgtttgcactgaaatgtgtggacttgacgccagaagcaactcctgcgtggcccgagtgtgggcctgggcggccctccattcctcggcagggcactgcctatcgcagcatccaggtgcagccgggggggacaggggtgaggagggaaggaggcatgagtgccagcctccccacacctgggagagcagcctagagaggagtagagggcagcaggggcccagtctgtcatccagagaggcaagggagaaggcaggggtgagcgaggcggtgcagggtggggctctgctcccacgggttcgatgtggggccatgcttggtggtggggccaggctgtgtcacctgtgaggtcacccctgttcctggcacctggtaggtcactgaatcaacagcccaccgccagcagggcagggcgatgcattttgcgtccctggctcaactgcagagtttcgttaccatttcccggaaacccagactctcaccaatgcagatggtctcctagctatttttaatgagggaagatttgttggaagcacaaaattgaattaagtcacattcagaaattctccttcaaagaggaactcacacagtcaagctgagaaagccagcatctgaggatagcggagctgctctgtggtgaacatagaatgtggggccctgacggactgtccccttgccctgacgcctctcctggcctctgcccccacactctggcaccagaatgtccacggggacagctctggtctggcctggcctgagctgcaggctctcctgtcacagcactggctgaatgcctcccctggtgtcccctggcctttccccggctggccacctgtcccccactgagctcacggcttctccctgaaccagcttctactccagtcccaaaccagctccacactgtggctctcggccccgtgcccctctccccacaccagcatgtcactgcgctcgccggctgtgttcccaagcactttctccctcctctcctttctctaccacagcccaggccttcctcacctcatgctcttcacccatccacctgtccatccttgtccccggagacgctgtcatcccacccaagtgacctgccagccactgtggaagttctatgcactgcagatgttaaacgtgaggctttttcctactcagggatgtgcagtcaaattggtgctcagatggagtctgatgaaaggcaagctctggaaggaacacggaccctgagcaagtgtgagagacgtaagccagcaatgaagccatgccccaaagcgaatccaccaccatccaattcccgctcatacacagcaggccagaaagacttccacgctgcacacaacgctcagagcagaacgtctgggaatcaatctatccaaatttgatttaatttatgtggaatttagagacctgagacctgttgatttatgtagaatttaggcttcccccgtctgaatcgcgctggtgtatctggaatttaggcttcccccgtctgaattgtgctggtgtatctggaatttaggcttcccccgtctgaagtgtgctggtgtgggtggaatttaggcttcccccatctgaatcgcgctggtgtatctggaatttaggcttccctcgtctgaattgtgctggtgtgggtggaatttaggcttcccccgtctgaattgcgctggtttacgtgacatttaggctacccccacctgaaacacatttatttgcagacgcttgcttacaaatagcagcctgaaactgttcattttctcttgtaattcacaaataaaacaggaattacgaacataaaacttctataatcaaacgggtaaggatattagccatcaggtcactgaaagctttgtttgtctattattggagccaatttcctggttaaatttactttacattttgatatgtattcagttctcagataaacacactatggaggttcctcagtgtatgatggggttacatcatggggttacatcccaatgaacccggtgcaagtcgaaatgtgctaggttagagacgtactggatccatataacctgctgagcatcacagctcagcccagcctgccttacgtgtgctcagaacactcatgcaagcctgcagctgggcgaaaccatctctcacaaagcctgtttatgataaagtgctgaagatatcaggccatttcttgactactgccctgaaagtgaataacagcgtagttgggtgagcactcagagtacagtttcacaccactgtaaagtgagaaatactaagtccaaccatcctgaggcggggaccatctgtgtattgttgagtctgctttccatgaatcatgcttcttcttacatgataaatttaaagtaaattaaaaggcatgcattacatgttaaatgggacagagtcaatatctggcttgaaatattatcaatattttaaagataatattaactaaattttataaccttaaaaatgtactgatctgaaataaaattctcgtgtccttaaaaataacctgctttttcccatactaaacaaaaataaactgacttttaaaaaacctgtgggggaaaggacggtttcctcaacaggtggttctgggagaactggatatctacacgcagaggagtgagccagaccctcgcctcccaggagaactggatatccacacgcagaggactgcggccagaccctcgcctcccaggagaactggatatccacatgcagaggagtgagccagaccctggcctcccaggagaactggatacctacacccagaggagtgtggccagaccctcgcctcccaggagaactggatatctacacacagaggagtgtggccagaccctcgcctcccaggagaactggatatctacacacagaggagtgagccagaccctcgcctcccaggagaactggatatccacatgcagaggagtgagccagaccctcacctcccaggagaactggatatccacacgcagaggacggcggccagaccctcacctcccaggagaactggatatccacacgcagaggagtgagccagaccctcgcctcccaggagaactggatacctacacccagaggagtgtggccataccctcgcctcccaggagaactggatatctacacacagaggagtgagccagaccctcgcctcccaggagaactggatatccacatgcagaggagtgagccagaccctcacctcccaggagaactggatatccacacgcagaggactgcggccagaccctcacctcccaggagaactggatatccacacgcagaggagtgagccagaccctcgcctcccaggagaactggatatccacacgcagaggagtgaaccagaccctcgcctcccaggagaactggatatccacacgcagaggagtgagccagaccctcgcctcccaggagaactggatatccacatgcagaggagtgagccagaccctcgcctcccaggagaactggatatccacacgcagaggagtgtggccagaccctcgcctcccaggagaactggatatccacacgcagaggagtgtggccagaccctcacctcccaggaaaactggatatccacatgcagaggaatgagccagactctcgcctcccaggaaaactggatatccacatgcagaggaatgagccagactctcgcctcccaggagaactggatatccacacgcagaggagtgtggccagaccctcacctcccaggaaaactggatatccacatgcagaggaatgagccagaccctcgcctcccaggagaactggatatccacacgcagaggagtgtggccataccctcgcctcccaggagaactggatatccacacgcagaggagtgtggccagaccctcgcctcccaggaaaactggatatccacacgcagaggagtgagccagaccgtcacctcccacccgagcgtgcgctgactcacagcgaatagcagagtggctggacgcacacttggccagaacatacatgaactcagagctaaatgtgagacctaaaacatacagggcaagacctttatgacattggatttggccacgatttcctggatataacaccaaaaacacaggcacaaaagaaaaaaatagataaattgggtttgatgacactcaaaacgtttgtgcgtcaaagcgcaccatccagagagcgaaaagacaacccatataaagggggaaaagatttgcgaatcaaattgcagtgggggattaatatccagaacatgtaggaaacttccacaactcaactacaataacgatggaaaaccatctcgttcagaaaacacaaagtacttgaacacatgtttctccaaagaagacacacaaatgacctcaggcacaggcagaggcgcttggcgtcaccaaaatcattggggaagcatgattcctcagtgcaattccacctcatgccatgtgcgtgactcttaccgaaaaaaacagaaagtaacaggtgctggtgagaaggcagagagatgggaacactgcgctattgcagcagctagggagaacagggtggcggttcctcagagttagaaatggaattcccataggagccggcagccctatgtctgggtgtccatggagaacaactgaaagcagggtcttgaagaggtatttgcacgccaggttcacagcaactttatgacagcagccaaagggtggatgcaaggccagcatctgtggacggatggacagaggagcaaaatgtggtccatccacactgacagatgtcaccagccctaagaggagggggtgcagacatatggcataacatggggagtcctgaggacatgtgcccagtgaaataagccagtcaccaaaggacacatacagcacaacacagggaaccctggggacactgcccagtgaaagaagccatcactagaggacacagactgtgtgattccacttgtgtgaggtccctggagtcatcaaactcagagacagagggtagagtgggctgccggggtggggggaggaacaggggtcagtgtttactggggacagagttccagtttgggatgatggaaggttctggaaatgggtggtggagatgctcgcacaacgttgtgaacacatacaatgctaagaggcgtgcacctaaaaacggttaggacgatccattttctgttttgtgtcgtttacgtaactatgagattctgtattactgagaaaaaggcttgagagaaccagaagtgtcacgtaaagtgtgaggcgtgagccgtgagcagtgattgagcccagacccccgcgaccagctctgctgctggccctgcctgaagctgcagcagcccctgcccttggacccctgagtctgtggggcctgcactgctgcatctctggctgccctgtgcccagaaacccaccctccatccttccacactcagagcctcctcccagctgagcaccctcccctctgctatggggcatctgtgggccccccagctcccaccctgcagacgtctgtgggctctgcctctcccgtctacacctggaggcccagaggggctcctgagggccacctggtacccggtgggtacccagcgagggtctggcaaggaggtcagctcagctgggcagacacatgcagcccggaggcctggggtgtccgggtcccacgaagccaggagaacacagatggggccgactctgccgcgcggtctcctcactgtgcttcctgcaatcatgccttgtacagcctcctgacaggccaccctcagccccatgtggccagcagcaagggctgctgttgcaccccaagcctctccgtctaggggaagaaggcgcgtgaagatctttctcagaaaggacaagcccacagcatctgcgtcggtgcctcctgcctctgacagggctcctggcgcccatggcggctggggtttcacgggggcgaggggctgggccacacttgtctgcatcccggggcccttggctcagtggacaaaacagctttaaagttcaaggataactcaaattggattttagaaatacaaagtcttaaaacatttgtaccagactaagggattacactcttaacttatccacagaaaggcttttgaagaggtggggaaaggtagctcagattttaaattggggcctcaaaacctgcctgtctgcggctccttcctttgcctggctgctattatcaaaaggtaaaatgtcttagactattgaaaaaaggatttgcataaattgcttttacctgcttcttatatgaggttaatgaaattggaacaaaaaggaatgaattcccaatcccagaccagaacctcaaatcccccagaagagacttccatgagccccactgagcccaggcatgaagaactctttctctgggtccaggagtggcaccaccttaatcagctctcctcataaatgtcccaaggagaccaggaaacagcctcgagggagacggcgctgacccggggccaggggagtttggctcacgtgatccagtcacacagaggtcggtcgttgtctggacacagacaatgggaatctgggctgataccgggcctttgaaaatagtcggggaggaaaacagaaaagatgcagaagttgataattgctttgatatacccatctctgtttttttttttggacagaattcctattaaatacaatatagagtatttcattttctgcatctgcccatctttgaatcttcatgtatttttaaaaaagaatgaatttaaaactctaatccacttggcccagatttgttttgggaggcaggtgggaacccatgagctgtcttgagcacagtggctggagtctgtgcggtggctggaaccctgggctctggagggctggatgccttcaggtcccggaccccccactctgctcccgtggacagctccatcttcagcagctccgtgcatagggactcctgggaagacttctctttgaggaaatgtttccgctgctaaaatgcaaagttccccgaaggcaggtgggcactgtgctggtgctgtccgagtggagcctctggtgagccggacaccatcaaacaacatcagagcttgcaaaaggagctctgcagtgcctgagacctgcaaagggccatcctggggtccgagggcttcctggtcctgacccagtcctgcagggaggtcctgggagggtcgctagggtgaggacgctgagagcccatgtgctggaaaggacccaggaagagggctgaggtctcacgcctggcagagatggtgcccaggtagtgactgcaccacacccataagggccacctgctggccacgtggaggacggggagcggcaggcggatgagggaaggaccgtccatttgactgggccacaggtgtttagattaaacctgatccacgtgtgtctgtgagtgtgactcggaggagtccagcattggattcagtgggccaggaacagggcattcttctctccagggagcagaaaccacaagatagacatggcccattgtgctcgagggtcactttcattggaagatttagagaaaatgatttttatacaataacgatatgggcttatagggtaaagtccacattcgcataaaattttaaccaagtagggacagagcctggcaattctgggttctgagacccctggggatggcacctgagtcccactcaggccaccacccctgcccccccccgggcactcggggtgaagctgtgtcactgtggctggacacatgtcctggaatcagagttgctctttaactgtgtctggctttaaggctcgtcttctacgccagacaaagtaaacttcctggaactgttttttgaaatgtggctactgtcctttcctcttctagaaaaacgaggatgaggagccaaaacagaggagggtgtcgcaagcggcagacatttgaaagcagcttaagcccctgagccccctttctggggttcctgggcaagaggtcgcacgcctggccgaggtggtgccccaggggtgacagcggttgccctcctgtatggcacaactgaaaataaaggctgggccatttccccctccatctgccaaaatcccattactgaggttgtcaaaatgcttcaacctctcttaaaatgcagtgagattgcttcacgatgaagggtatgaccaagtggaattgtacacggtatagttaggaggtgatgatgaccacagtggggtctttaaaacagtgcacggcccgcctaggggacagagccggccctcccaacacttccccgctacagaggcgttctgtggccccggggctgctccccgcctgggcacatggcggagacatgcaagccacaggggagggctctgacctcggcgtggctcccgccagggacctggcagctcttccgcttgttctctctctcattcctcatggggactgcactaggactttccccttctccccaactccccacccaatgccccctcttttgtggcaggtgagctcacgtcctgctctgaagagaaaatggaggtgccacacgtggtctcctgaactcccagccctggacgagggggtcctgtctcattcaagtaaaccccctgcagttcccagcagccttaggacagcaggctcctttacgacttcacctctgcgctgcccccactgagaagctcctgctaacctcgtccagttgtcaaatcacttcttagcatgcaaaaccttgcccgcatatcagctgctctgccaagcccaccctgagttccgaggaaggtaatcgaggtgccttcctgaaggtctgcaccaggcagaaagccctgttacagcctagttgcatcgtgtgacaactgcctgctcataatgtgaactctgcggtgactagaaccgtatctggcatatggcagacattcagtacaaaacccatggacagaacaaataagtaagtccagaggtctccctggggacagggcctgtgttactcttccttcccacgcgcccagcacagttaccctttcccgtcccatgcgcccagcacagttaccctttcccgtcccatgcgcccagcacagttaccctttcccgtcccatgcgcccagcacagttactcttttccaccccatgcgcccagcacagttaccctttcccgtcccacgcgcccagcacagttaccctttcccgtcccacgcgcccagcacagttaccctttcccgtcccacgcgcccagcacagttaccctttcccgtcccacgcgcccagcacagttaccctttcccgtcccacgcgcccagcacagttactcttttccaccccatgcgcccagcacagttacccttttccgccccatgcgcccagcacagttacccttttccgccccatgcgcccagcacagttactcttttccgccccatgcgcccagcacagttactctttcccgtcccatgcgcccagcacagttaccctttcccgtcccatgcgcccagcacagttaccctttcccgtcccatgcgcccagcacagttaccctttcccgtcccatggcccagcacagttacccttttccgccccatggcccagcacagttactcttttccaccccatgcgcccagcacagttaccctttcccgtcccacgcgcccagcacagttactcttttccgccccatgcgcccagcacagttaccctttcccgtcccatgcgcccagcacagttacccttttccgccccacgcgcccagcacagttactctttcccgtcccacgcgcccagcacagttaccctttcccgtcccacgcgcccagcacagttaccctttcccgtcccacgcgcccagcacagttaccctttcccgtcccacgcgcccagcacagttaccctttcccgtcccacacgcccagcacagttacccttttccaccccacgcgcccagcacagttacccttttccgccccatgcgcccagcacagttacccttttccgccccatgcgcccagcacagttacccttttccgtcccatgcgcccagcacagttaccctttcccgtcccatgcgcccagcacagttaccctttcccgtcccacgcgcccagcacagttaccctttcccgtcccacgcgcccagcacagttaccctttcccgtcccacgcgcccagcacagttaccctttcccgtcccacgcgcccagcacagttaccctttcccgtcccacgcgcccagcacagttaccctttcccgtcccacgcgcccagcacagttaccctttcccgtcccacgcgcccagcacagttactcttttccgtcccacgcgcccagcacagttactcttccgtcccacgcgcccagcacagttaccctttcccgtcccacgcgcccagcacagttactcttttccgtcccatgcgcccagcacagttactctttcccgtcccatgcgcccagcacagttaccctttcccgtcccatgcgcccagcacagttaccctttcccgtcccatgcgcccagcacagttaccctttcccgtcccaggcgcccagcacagttaccctttcccgtcccacgcgcccagcacagttacccttttccgtcccacgcgcccagcacagttactcttccgtcccatgcgcccagcacagttactctttcccgtcccaggcgcccagcacagttactctttcccgtcccaggcgcccagcacagttaccctttcccgtcccatgcgcccagcacagttaccctttcccgtcccacgcgcccagcacagttactcttttccgtcccacgcgcccagcacagttactcttccgtcccatgcgcccagcacagttaccctttcccgtcccacgcgcccagcacagttactcttttccgtcccatgcgcccagcacagttactcttttccgtcccatgcgcccagcacagttacccttccaccccatgcgcccagcacagttactcttttccgtcccatgcgcccagcacagttactcttttccgccccatgcgcccagcacagttactcttttccgtcccatgcgcccagcacagttactctttgccgtcccatgcgcccagcacagttactctttgccgtcccatgcgcccagcacagttaccctttcccgtcccatgcgcccagcacagttaccctttcccgtcccatgcgcccagcacagttaccctttcccgtcccatgcgcccagcacagttaccctttcccgtcccatgcgcccagcacagttaccctttcccgtcccatgcgcccagcacagttaccctttcccgtcccaggcgcccagcacagttaccctttcccgtcccacgcgcccagcacagttactcttttccgtcccacgcgcccagcacagttactcttccgtcccatgcgcccagcacagttactcttttccgtcccatgcgcccagcacagttacccttttccgtcccaggcgcccagcacagttaccctttcccgtcccatgcgcccagcacagttaccctttcccgtcccatgcgcccagcacagttacccttttccgtcccatgcgcccagcacagttaccctttcccgtcccatgcgcccagcacagttacccttttccgtcccatgcacccagcacagttaccctttcccgtcccatgcgcccagcacagttaccctttcccgtcccaggcgcccagcacagttactcttttccaccccatgcacccagcacagttactcttttccgtcccatgcgcccagcacagttactcttccaccccatgctcccagcacactcttccgtcccatgtgcccagtgcagtcttccgtcccatgcgcccagtgcagttactcttccgtcccatgcacccagcgcagttactcttttccattccatgcacccagcacagtcataggcttccagggtaggtactgtcaatgtttgttccaggaaaacccaattcagcttttcaaacaagatttatacacaccttcaggagcaagcatgcttgaatataatgagtctacctttaaggtaaatttcagctctttgggtttgtaatggatggaaaaaggcaggcaaagaaacaatttcaacatcttccagccccagagatgtacaaatattttagcaacatcccagtgactaaatggtgattcagccgagacgccccaaataaacagtctctattcttaactctgctcccatcttactgaagcgttacaaggctgtacttacatctggggtcaagccattctcatttggcttcgaaatgataacacaaaactgttacaataacctggaactgtaagggtcctggggatcccacattcagtcccacccgtgtcatggatgaacccgggaccagcagggcagccagccagaggcaaacccacaccaggacctggcgctcggccatgtgcctgcgttttccaatattgatgtcgacgtgggaggcaagttgctatggaggaaacgcgcacacacatctgagattattaaatagcagccgctaactgcctcgatgcaggagtcccatctccccaaacaaattctggctgtgatgccaactgcagcaggacggttagtggtgccgctggcaccgagagcacctggcctggtggacctgtctcccagacctgctggggagcgccgtgtgctcagctgaacacggctcctgtggccacagtcctgtgttgctcccgtggttcggccggcgaagctccgtgttcatgtgcacagccacattggccattttgacccaacagacactcaagcaactcttgcgtgaatttggtgggaagatccatcgaatgtattgtttttggactaacctgatgagtccctttggtaaagcagtcccactgactatgcctgtggacccagctgggtgcagccatctctgactgtatggtgtccatcctgagctccaagtcatcagagagcggccaggagtgcatctgactttgctggtgacctgcatcttatctgcgtccacactcaactgtgtgcagcggcccaggaaggtggagggctgctgagctgctttagaaaatgagggtttgaagctgccctttggaaatgattaggttgttcaaaagtaattgagctttctcaaaaggcagctggggctaaaataaatggaagtctacttaacatattgttaaaaatatgaaggggttgaatggcatcaaaacacattaaatgacagaacatgactcgcctccttggctggattctaaactcctcggggcaggcgctttctttagtgacactctcagtgttgtttgtgggagacgctccgcaaatgtggggagcaggtgggcgcctttggtccccgtcctcctggcaggcagtggctgagtaccttctcgggaaaggaggcccccgtgaggctgggtgggctctgaattcccggtgtgttgatagcgatcggcacatgcctcaagccacctggaagagaagctgccccaagattctccaggccctttctgagctgaaggtgacgtgacagacaggcttcaaagaagggtcagagacggccggtgggtgggccccgttcccaaacacccaccttggatctcatgccctggagcagagcatgtgtcctggtcctgcctgggcgaggccggcacccgctgccctagcttcaccactggtagccccaagcatctctggctggggatacatcacccgatcacaccagcccgagaaccttccctttcccaccaccattcaaaggaggctgctcttagccagaaggcctctgtgttccaggcttaaatctgggcgagattcagggtttaactctggccttgcagttttagaggttgttataggctgaattgtgaccccccaaatccatccattgaagctctgatccccatgtgcctatatttggagacaggacctccaaggagctaattaaggttcaatgaggccaaaagggcggccccgatcctacaggactggtgtccttacaagaagagtgagagacaccccgtgcctgcaccagggaaaggccgtgtgaggacatggggagaagatgctgtccacaagcccgggagagaggtcacaggaagaaccgcccccacccccgccgccccccacagcttggtctgggactgtcagagctgtgagaacagacgtgtcctgcagtttaatgcacccagtctgtggtcctgggcacggccacccgtgatgacttacacacagatgcacgcagacggcttggggagcatggccagtgcttgtcttagtgtgggaggcttggtgtccgcccctggccacggagtctcgtgtctcctgctctttcgtggacggcgctcacctacatcttacatgcaggtccctccatgttgagtgaaaaaatcagaggaggtacaatcccaccagtgcccggctggacacatattggttttggagccaaggggtaacagtttccctctacaaatgaaaagctcctctccgtcctggtgggatggggatgacatttttaaagggtagagtaaatgtgctcctgcttcaggtgccctttgcagaggcttcccgagtctcccgggggcaatgcatcttctcagtaagaagaaaccccagcaagaaatcacaccaggcgtcttggataaacagaagtgaactacgtcctggttgcagctgtatttatttcacacattcatttaaaaagttaatttgacatgtatttcatgaagcttcggtacacacgccacgttgctccccgattttatcttcatgcgtcttccttcaccagacggcctggcgagctcactctcctgtctgagggctgagaagcccaagctcgccccagactggggcctgtgtggacgcggcccccagcagtgttcctgtgtccgtggtttggaggctctgttcgctgagcctcagcacgacctcaacctgatctgggagtctgagtgcgctgggcttggagggcacgtgtgctgtgagtgagccctacatgcaggagcatggtgctctctggccgggcagcctcacctccagtggaagctaagcgttgtgcccgggcagggggcgcaggcaggagggctgagcttccctggttatcccctgaggcgaggacgcagcagcaagttcccatcccctggcctggcttctctgggcccaggcgctcccattcgtactcacggtcctgagttgagctccagagtgttcccctacagggaggggtttgctttccccagaatggggcctgggcgtggcagcccctccacagaggaagggccctggtcctcgggagcatttacagcatcgtgggtgccggctggggcgccagccaccaaggccacaaggccggcttagaaggtctggaagagcctgactaggaattaggatgctgtgcgttaatctgcaaataccacccccgatgcggggaggacctggtgtctgggcgggggaggaggctccgaggggctcttgctgccttggccagacctgcagcagcagggacagaggctcccgggaatgcctgggtcagaagagagggctctgccactcacccctcctctcttctcatccatctcctggtgccccaaagggcctcactgttcctgtggagagctgttattttgaaattatatcttgtcatgaaagtttcacttttaaacactattaaggcctctcggtattatacttcttttgaaacatctattagaataaggatctcacaggcagctgagaatcaacaggaatgtggccgtacacaataagctccacgtgacccagggggacgtatctgtgtgctctgggaaggctgacatttcaacattcctggcgtctgaattcgacatctctcccaccaccgggaaggaggcgccccagaggggagggaggtgctggggagcgggattgagagcctgatactggcgtgaagttcatcagcagaggagcgaagggaggagggcagggtcaagaccagggactcatggaagcatttggcatcctgtgaagtttctcagcctctggaggctcctctctgatgggagccttatccgagaggtgggtgggagggacgcaggctgccggtgctggtcccgggttgtttgtggtgcagccagcggctggtcactcacatgcagactgagctgacgcttaggacaaaatccatgttttttcattttgaataaaatcactcgatatttgacattttaggcattgaagtcgtcatcacggctcatcacaggagaaatcagagctctgtgctgttgtttctggatacgtgcttgttttagggttttgtatgtattatttcagagctccgtgctgtttctggacacgtgttttagggttttgtatgtattatttctagttccatgaaggggtaggggcatcatgtccttaggatgctcacaggtcaaattagggctgtcccaccagccacccacacatccccagcgactttggtttggaggaagatggaaaagagtcaggagagaggggtgcagcccaggagacagagcacctggaaggatttgattttaagatttaacttcgcattaggggttttcttcataggctcctgcaattcagatagtatctttattccaaggagctttgagtggtttctgcatcagttttcatttcttgttcccaaatctctgtgacatagggagacaggcctttctctaaaacccactgcagacatgaagagccacagccgggggggactcacccaaggtcacacggttaatcctccatgttccggagattaaagcaaactccatggctctcagtctcgtctgaaacttcatgcctctgaattgcccctgaattacccacataacagcagctggacacaaatataagcagcagcagatgtgatgttggctgggacagccgagggaaactggtaaaatgcctcttcttcctgactactctctcaccccggcatctgcctccagagtctcgcagcctttggagatgggtttgcggcccaggggcaccttcgttgtagcttattcgtctatgaggggaggaaaagatggtctcctgtaaaaaatgttaaagtgccagcaagaaattgagggtagtatcttggagtgttgtgagaagagccgtcctgagttctgacggtcaccatacaggcagagtgacacctgtgccttcagctgccccgaggtcaactcaatgccaactgccatctgggactcttggagagctctttctccccaggtgtgaccagacaaggttgttatggaatcaaataccaaattatggcagatgctaatttcagtcatcttgcacacagatcagccctggggtcaccatactgtgtttttgggacactccaagatggatgtgctttggttctgacggcagagaacaggacacctcccaaggtgaccgcaaggaggcctgagctcctgggccgctcattccaccccctctgcgtgctcacgcatggctccccagcaagacagagcagctttcctctgacctcttcctcttccagaagccagagccagccagggttcagggagagcggaatcactgggactgtatggagtttccacttttagcacagctggatcttttcattaatttttttatatctacatgggtttaactgtacattatattgtgcttttttattgctgattcggccagcaggaccccttcctccatatgccttttatcactttatttaaccgtgttgtacacatacacccactttgctttgtatatggtgagctaccttaatgccattgcccagatgcagatttgttattatgtatacattgttaaatttaacactttccttggtggatcaggttcctgtagggcacagaacactaacctatcaatgacccagactcagaaaagccaccagagaaccagcaaggtcaaattgcttcggcttcagctccggaacatcgtctccctccgtccacggcaacgcgggagcctgaccagctccggaacatcgtctccctccatccacggcaaggcagggggagcctcaccagctccggaaccccgtctccctccgtccacggcaacgcgggagcctgaccagctccggaaccctgtctccctctgtccacggggtgacttcatgctgccatggccatcacctgggttgggggtgggtagtgcccagggcaggggaaacacacagagcaactgaaatattgtcgtctttccccagagagggctccaaggagtggcgggagcttctcagaggctcctaatcaatgctttttcttttaaacaatccacgagctaatgagagggtggagaatcccatcccgatgggcactggcttctttccagcaagcctcggaatcacctcagtgcccctggcccacgggatcccaggaatcaagttctgatggatttgtaagcagattcgttcttcagattataattagagccgctctctctccccgcctttttgaaagttcccattagcctgagcaagggccaaaatattattggaaaacccatgggccactttgttccctctgtaccacaggttaaaaccctatttactttgtcagagaggaaaaaataatcaaataaactctccatttcagatgctactgaaacgagcaacaagggaaggggggagatgatgctcatgtgatttggaggccaaaggtgcttctaactcacagtcggagccaccccacgcctccttccacaggctccatgacggcaaaggccctgtccaccagccctatggaaaagagcctggctccagcacctttcctgggacttgatttcctcactttttaaaatgacttgccaatcaattatcaattgataatgactactgattgcaacatatctttagtaagtaaaatgaaaggtgtgtcttactactgctggctgtttccggccaacaagcccaagactgagaattggtgaaggaaggcattgcctgtggacctccctcccatgggtgcccggcctgctcttagtcccccactgaaggctcttcggcacctagagccccatcatcccttccccgtgtgtttgctaacgctgttcatcttgtctaggatgcttctcctccatcaaaaccacttcaagaatcagtccctcctggaaccctccccggagacgctctcttcctcacctctctctggacatttgcaggaagaagcaagacccgtccacatgacccatgcacgattcagtggctctcctccctctgggaggtcagttttactggttgtacgtggagtcctctaagctatgagggaagaaggggacaactgtttggccaaaccatagtctctgtggcccttgggaagaaggatgttgtggacactgcacctggcatctcctgggcttctgtcctctctcagctttgctcttcatgtccccggcatttttaactcctagctcagttacttctctgctcatctttcctcttagacttggggtccttgagggccagctctatgtctggttcatctttgcattctccatcagattgcagaagttgtgtcaacgacgaaccaataaatgaatgtgtgcagtcgggtgtggcagggaccaacaatctgaccagcgctctttctgtgtggatggtctggccctgtgttgacaaacacctaaataatccagcacgattcccttctagatgtatctctctacggtgactgagtgtgctcaatgcttacaactaggctttttccaatcacctgtaactcatgtgaatgtggtcactgatttgagcatcaaaagggccaaagttatcgagggcttttgcatatgtagatggagaacaggtgactggggtaacgcgttatttacctgtatttagatgggcagtctccagatgtttttaaacaggtgactggggtaaccagctacttaactgtatttagacggggcagtctccagagatttttgaaaaggaagaaggaagtaaattcagttacttggatacaagtaggacagaaaatattcctttgagattgtgagggtatttattcattgaacagttttagaggtacagagagactacttgatgagctgacttctgtttttttttttttttccagaagtgggtatctaggtttgctgattgctggagtaaacgatgaatgtggatggcagggcagcattttggaggtgaagccatctgcagatgcgtgtaccccacgagggtgagaagctccaagcacacccagaatctagggtgggggactgttcgcctgagcagcaccaactccatctcaagatgtgtgtctgctgtctgttgctgttctttgtttgagctttgaactcctcacataaccccttaactgtcctcttgatcttttattcatgagcttgacacattgggcagaaagacacagtctcagtgagatgataccaacttggagcttagtttcttcttcctaataccttttgcttgtaattccaaagtattgatattaaatactcataagtagccaaggaagaggaccatcccactactcagtttaatctgtcttgaaaatgcttcggtattgcatgaacgtgatgcatgatccaacccaatgctctgtgctaaggctgtgcttgtgttatctgtggtgaagagaaccttgtaatgaatggaccactcactgagccaggctgtgcttgtgttatctgtggtggagagaaccttgtaatgaacggaccactcactgagcctgggcagctccctgcatctgacttctggagagttctagagatactcacaggtcaggaggtctcttggggtgagggcaggggaggcagctctgggaaccgaccatcagcaaaggtcagagacttagatgcccatccagtgggttcgaatgtcagccgccttccacagcgaggtctggtaatgggcttggacctgcctgaatcctcctggctaagctgtggagtggagccaggagtgctgtctgctcacggtgggaccagcctgcaatcggtgcggcgggctatgcttagggcctaagaattaggcttcccacctgccagcgatacaggcacgggataggccacattaccctgcttttgtgactcatccttcctccatttaagtgggacccacacttgtggctgggataacaatttccaggttggctgagttgggctcctggcaagccatggctgggatagctatctccaggttggctgagttgggctcctggcaagccatggctgggatagctatctccgggttggctgagttaggttcctggcaaggccatggctggggtaacgatctccaggttggctgagctgggcttctggcaagtccgtggctgggatagctatctctgggttggctgagttgggctctcggcaaggctgtggctgggataacaatctccaggttggctgagctgggcttctggcaaggccgtggctgggatagttatttccaggttggctgaattaggttcctggcatggctgtgaaagtgctgccccatttctttgccaccagccacggaagtcgcagctccctgtgtcctctttgcacgttgcatgtgtcgtggtgggagctgtgaggcggtgccgtgacggggcgatgctgctgcaggagacgtgctccggggcacgactctgacgcagcttagaagagctaatgcttgacaccatctggatccccttcatgctttctgtttttatgggaagtcctaattcaacacatgtttcctgaggtgctactacgtgctaggttactgggtacagcaagaccatggaggaatcagagcgtaaacaagcgggcgcgaggtggtccaggcatggagggcacagaagccgtgatgctggggtgggctgggggtcagctggcctcaacggggtgaacacagcagctctcccagacatcgaaggagattcaaggagcctgaaactcaaacaagtggaagaggctggaacgtcacctaaggtgataggaactggggacccgacctggcgcccgttcaacagacccaagcctcccatcccagcatcgggccgtgatgtgccgtccattacacaacgatggaatctgctctgggaagaataaatggctctggtgagcatgctcagaattccattttaatattaaaaaatttaaaataattcttggtttaaaacacaaatagaggtataatatagtagccatctagaacctcaatttaagatatgagattgggtctgcttttgaattttagaaagtagtaagagtctgctgttttcatgtttaaatgtgtgaggcacttcagtaccatcagaacgtgtgcagaagacggaggatgtggaagggcccccaaggacaggtctgtctgcctggtggacactgagtgaggtggaggggaagccacagatccccactgtcctcatcactcaggcacatccaggctgatgaaaaagcaacagaatgggttcaaaggcctcttaccaaacgactcggggcttccctcagcccctgggtgttcacttcagccgcaccccagtcccccggcatctctgaggggccctgaggcgtgtcacctcactccccaccacccctcacttctgcctccatgaaatgtgggtccccttccaggcggcaccttccttacgaggactacgggtgtctgagaggcgcctctgagtccctatgccaccgcatctgggttgggtcacgatgctccccttgcacggagctaagatttatagaccgagacagctccaggagtggccaccccagcatttctcaggggaagaaatgaggatgaaagaggtggagctcgtacagtcagcaacggtggcccctgggcagaccctagagctcctggggccctgcccaggtccttctgtgtatgtctcagcccaggtcatcacagatccagccagtgatctgctggatgagaagcttctgcacggactcgtccaccctctcactgtaaacattgctccagacgaacgcaaggctgagagccgggggtggtctgcgggaggcaggcatgggggagaggacaggctgcgggaggcaggttgggggagaggacaggctgtgggaggcaggctcagggacagggcaggctcagggaggcaggctgggggagagggcaggctgcacaatgctgggctcctccgacaatgctcacctctcttctcccctccatttgcacctcagtcctgatatttatctccccaaaacgtctgggacactgggcagaggctgagtgagggtgccagcatctgcagggcaggctggaggccgctgctttgctctcaaatgtcagcatcttttgtaggctccagaaccgtgtggataaagcaaaacgctcacccaagaggaagctgatacagcagcaaagaccacccaacgatctggttcctacccatttccaggcagtcggtaaatgaaacctaacatgtttgacgcacgccctgatttgaccatcacaaagctccttctctggctgcaggatgcactcagcacgcacgccacaaacatggagatcacaggactccctacacaccatagtccatacagggccttgagtgtggagatcacaggcctcccctgcaccccacagtcctcacagggccctgagtgtggagatcacaggactccctgcaccccacagtcctcacagggccctgagtgtggagatcacaggactccctacaccccacagtcctccctacaccccacagtcctcacagggccaagagcatggagatcatgggcctccctacaccccacagtcctcatgggaccctgagcatgaagatcacgggcctcccctagaccccacagtcctcatgggaccctgagcatggagatcatgggcctccctacactccacagtccacatggggccaagagcatggagatcatgggcctcccctagaccctacagtcctcacggggccctgagcaaggagatcatgggattccctacaacccacagtcctcacggggccctgagcaaggagatcacgggactccccgcaccccacagtccacacggagccctgagtgtggagatcacgggactccctacaccctacagtactcacggggccctgagcaaggagatcacgggactccctgcaccccacagtccacacggggccctgagtgtgatcacgggactccctacaccccacagtcctcacggggccaagggcgtggagatcacgggcctccatacaccccacagtcctcacggtgccaacagcatagagatcacgggcctctatacaccccacagtcttcacggggccctgagtatggagatcacgggactgccctgcacccacagtcctcagcagtttctagagcagaagatgcccattaaaggcagatctcttccgttcagctgcctggtctgctgagcagttgagggggatggtgaggcagtgtgggaatccgcatgtgttgaggcctgcatccctgagctgcgggcagttgaggtgattctgaggcctgtgtccctgagctgtgggctgttgaggtgattctgaggcctgcgtccctgagctctgggctgtccgggtgattctgaggcctgcgtctctcagctgtgggctgttgaggcgattctgaggcctgtgtccctgagctgtgggctgttgaggtgattctgaggcctgcgtccctgagctgtggggtgtccgggtgattctgaggcctgcatctctgagctgtgggctgttgaggcgattctgaggcctgtgtccctgagctgtgggctgttgaggtgattctgaggcctgcgtccctgagctgtggggtgtgcgggtgattctgaggcctgcgtccctgagctgtgggctgttgaggtgattctgaggcctgcgtctctgagctgtggggtgtccgggtgattctgaggcctgcgtctctgagctgtggggtgtccgggtgattctgaggcctgcgtccctgagctgtggggtgtccgggtgattctgaggcctgcgtccctgagctgtgggctgttgaggtgattctgaggcctgcgtccctgagctttgggctgtccgggtgattctgaggcctgcgtccctgagctgtggggtgtccgcgtgattctgaggcctgcgtccctgagctgtggggtgtgcgggtgattctgaggcctgcgtccctgagctgtgggctgttgaggtgattctgaggcctgcgtctctgagctgtggggtgtccgggtgattctgaggcctgcgtctctgagctgtggggtgtgcgggtgattctgaggcctgcgtccctgagctgtgggctgttgaggtgattctgaggcctgcgtctctcagctgtgggctgttgaggtgattctgaggcctgcatctctgagctctgggctgtccgggtgattctgaggcctgcgtccctgagctgtgggctgttgaggtgattctgaggcctgcgtccctgagctttgggctgtccgggtgattctgaggcctgcgtccctgagctgtggggtgtccgggtgattctgaggcctgcgtccctgaggtgtggggtgtccgggcgattgtgaggcctgtgtccctgagctgcaggctgttgaggtgattctgaggcctgcgtctctgagctgtggggtgtccgggtgattctgaggcctgcgtccctgagctctgggctgtccgggtgattctgaggcctgcgtctctcagctgtgggctgttgaggtgattctgaggcctgcgtccctgagctgtctggtgtctgggtgattctgacccctgcgtctctgagctgtagggtgtctgggagattctgaggcctgcgtccctgagctgtgagctgttgaggtaattctgaggcctgcgtccctgaggtaggagctgcccgggtgattctgaggcctgcgtccctgagctgtggggtgtctgggggattctgaggcctgcatctctgagcagaggggtgtccgggcaattctgaggcctgcgtccctgagctgtgagctgcctgggtgattttgaggcctgcgtccctgagctgcggggtttctcggtaattctgaggcctgtgtccctgagctgtggggtgtctgggtgattctgaggcctgcgtccctgagctgcggagtgtctgggtgattcttaggtctgcgtctctgagctgtggggtgtccgggtgattctgaggcctgcgtccctgagctctggggtgtctgggtgattctgaggtctgcgtccctgagctgtgggctgttgacgtgattctgatgcctgcgtccctgagctgtgggctgttcaggtgattgtgaggcctgcgtctatgagctgtgggctgttgaggtgattctgaggcctgcgtccctgagctgtgggctgtccgggtgattctgaggcctgcgtccctgagctgtgggctgttgaggtgattctgaggcctgcgtccctgagctgtgggctgttgaggtgattctgaggcctgtgtccctgagctgtgggctgtccgggtgattctgaggcctgcgtccctgagctgtgggctgttgaggtgattctgaggcctgcgtccctgagctgtgggctgttgaggtgattctgaggcctgtgtccctgagctctgggctgtccgggtgattctgaggcctgcgtccctgagctgtgggctgttgaggtgattctgaggcctgcgtccctgagctgtgggctgtccgggtgattctgaggcctgcgtccctgagctgtgggctgttgaggtgattctgaggcctgcgtccctgagctgtgggctgttgaggtgattctgaggcctgtgtccctgagctctgggctgtccgggtgattctgaggcctgcgtccctgagctgtgggctgttgaggtgattctgaggcgtgcgtccctgagctgtgaactgcccgggtgattctgaggcctgcgtccctgaggtgcggggtgtctgggtgattctgaggcctgcgtccctgagctacaggctgttgaggtgattctgtggcctgtgtccctgagctgtggggtgtccgggtgattctgaggcctgcgtccctgagctacaggctgttgaggtgattctgtggcctgtgtccctgagctgtgggttgtctgggtgattctgaggcctgcgtccctgagctgcgggctgttgaggtgattctgaggcctgtgtccctgagctgcggggtgtctgggtgattctgaagcctgcggctgtgagctgtggggtgtctgagtgattctgcggcctgtgtctctgagctgtggggtgtccgggtgattctgaggcctgcgtccctgagctgcggggtgtcagggtgattctgaggcctgtgtccctgagctgtgagctgcccgggtgattctgaggcctgcgtccctgagctgcggggtgtgtgggtgattctgaggcctgcgtccctcagctgtggggtgcctgggtgattttgaggcctgcgtccctgagctgtgggctgttgaggtgattctgaggcctgtgtccctgcgctgtggggtgtctgggtgattctgaggcctgcatctctgagctgtggggtgtccgggtgattctgaggcctgtgtccccgagctgtgggctgttcacgtgattctgaggcctgtgtccctgagctgtagactgttcgggtgactctgaggcctgcttctctgtgctgtgggctccccaggggattctgagggctcttttgcttgtggcccttctgcttggcatgcatactcaggcctgcaacatagcacgtggtcctgatccttcttcgtaatgtgtattttactggttggttgcttgttgttcataatttttattatatcatcttttagagaatgctcgatttagagaaaaaaggatgagttttggaagcagccctaccaatgttctttctcttgtttcttgttgtgtggttttggccaaacgatcaaaacaatcaaatctctgggtcttggcttcccccacggcaatgaggctggccggatgtagggagtgaggcgtagaggatgagctgctactactgcacaggaatgtcccagcctgctgccagctccttggggaagcagcaagatgccacccaggtgagctgcttcctccgcacctatgagaggcaggaagtggcaggtaacatggagctgctggagacccagccccagggaccccctgccaatatctgagtgaacagttcttgcaagctaggaaggctggcccgaggatggcagttgtatctggcatttcttggagtgtctccagtttattttggaaataggttttggcaaaagttcaaaatgtcaaactcctgaggctttcagttgtcctctccctccggctccagtgtcgagtacccagtgagctgttgagagagaaattcttaaatgtaccgcagcgttcagctcctcagtgggttcggaaacagctggaaggaagggtgtaaagcccgcctgagatggcttcctcagggtttgcctcccagagacaccgtggcattggagcagggtgcagctgcattctggggtgggccagctcggcaccatcggccgatcttcctggacgagccagggctcgctggtaggccgtggaaccttctggccgcatctttagcttctctagaaagggctactcgaccgtgggctctaaagagcctcctcaccagtgagcgtcctgcccaactctgggaaaacctcccagatcctggcggggagctgctgtgagctgtggggccgaggaggctcccgacgcccagtagtaggctggggggacctgcagccgcaggaccaagggattgatttctttctcggttataaattgcaactggagacatgctgacatgtgaagggaagctcgtggatggggggcacaaggcaatatcccgaggagagagacaggctcaattccagtttgcgcgcactggacaaagtgaggatggggtcagcgagggagagcaggtggaaagaaaaaaatccatgcggcgaacgccctggctgtggcagcgggtttatttttgaatgaaggcaccatgcatttaaattaaatgtcagatgtaatttagcacccaggcatcaagaggctgagcgtgtgcagggaaagccggcagctcgcaggagtggctgagtgcctgctctccagcgcccacggagtgcgctcgctcgggaggtgtctctgtcctcggcgtgggagggtctttgagaaggtgaagcttggctgttgctaagacacacgagatcattgtttggaaggcgttttcccttctctctccctcaaatgactgtttaattgaggttactctgcaccgctgacacgcggtggaaagcccgacatcacttggagaacttaatcaaggctgatggagccgcgcgcacagaatcccaactgcccgcaccctttgtttcatgttcaccaagaccgaggggaccattcctacgggatgaggaaacacatctaacacaggccttctaaagagagaggagggagggagggagggatggaaagggggaaggacagagaccaccgtgaacacatctccgcttttcgctatgggcagatgcttccatagacatgggactttgcagccaagtgggacttgcagttgccctggacagcccggccttgcgagactcccattccgatttcttgacccctgagggtagatatgctcagaaaagctctggtcttcaggctgcaagctcccaagcaggatccacgagctcctgcaccccaaaccccaggctcctccacacgcactcacgaggggctcttcagagcccacctgcctgctgtgtctgcagctctggcctggctcggctgggttttctccagggtgggggcaccgagtggccagggcggctaagacaggtcggccatcacggatgtagcggggaacgtcgtaagtgctgcctcaacaacatggtgacttgtccgaacatgacctgactttgcatcccagggaaggcacagccacagcttcccatcctctgagagccccagagggggcaggcttcaggatgggtctgcagctgtgctctgggcgagcacgtgccctcgtccagtctcccttcctgggcagcccaggccagagctcccctggggtcgagctgggcgactggtgcgcggtgtggctgtcgcccttttgtgctggcctcagggtcaacgcgcactctctcttctgcttccctgtttccagctggcttcttcacccgaaagcccatcctcgtcttatcaaatctgatcctctccccagccacaagctcccacctaacctacagcccacctccaggtacagaggccaccctctctgtttccgtcttcctgccctgattgcagcttcctctcctacctggagtccagcatccatattttcatcttttagaacagaggacacccatcaaaggcagcaaaccactgactctggaaatctgtgattagagatggccagctccatctcagggatggcgagggccgccaagacaaggaacagccgtgggacagaccctcgcagcagccacgccgcctttcagaagggttcagggcttatgacaaacatctggcagcacccactcctgctggaagcccagacagtcagtgaccagatggttttgccatggccggcagtgctgataacagacggtcaggagatggatttctgtggtgtggctgttctccaaggggcaggaactaactgggaggaaaggcggggtgtcggcacaggcaccctctccaggcctgcgtgcagggggcaaggacagtgaagctactgacacttatgtctctgctcaaatcctaaacgcctccctctgctgacgtcggaacccacaccccgcgcagtgggcttctgtcccccgggcagtgccatgtgccaggcatgtctgctgtgctgtgggaggagacggtgctgttccctggccgatgcccactggaccccacagaggaactgtgctgtggggtgtggttcccacagacccttcatcgggaaagttgagaacttacaataggaagtgcagtttggtgcaagcttttcccttcctgccagcctcctgtgctatcagaacacagccccagacacaaagcccattacaaagtgaccagcacaggcaccagccaccactgcttctcctcccgtctgggcctcactccagccctagtggcctccgtctgggccgcagctcacagcatggcagtgacccttcctccaacacccccacctctgaaaatgtccatgtttctagtcgaagctccgttctctaccacgtgccaggccccacacctgccttaacgcctcccctccgttctctaccatgtgccaggccccacacctgccttaacgcctcccctccgttctctaccatgtgccaggccccacacctgccctaacgcttcccagatcgtggcatgcgtgcatggctgcaggtccctgctctcctggcatctgcaaccgtgccctgcccacctccccatcccccaccggttccttgccaggcaagaaccaaagccacctagcacagcacccccatccgcggccatggctgctgtccaggcatcacgcccacacctgccaccaggcccagcatcttgctccctcctcatcctggcaccagctgaccccatccttgggaggccttggtctctggttccccgctcccctatctgaagtgggtgctggtgagaggctgggaggaccaggcgttgtggctgggatctgtggcaacccaggaaggagctgcaactccgaggagttggggtgtgaaaacaatcgtccactgtgggctcaggaagagcagggcctggtgcgggcccttcccgaggaagcctgtggggcctgagtcctgggagaagcaaactcaggcctggaggctgagtccgtgtggggaatgtggcctgtgctgctgctcctgtggactcacgagccgtcaggacactgagccacgttacctggtgcttctccagcatgggcctgtctagcaaagcagtggcagtgctctgagctgggggcaggcggacatgccccgacactcggcttccaccaaacagggtggtccaagcactgagttctagaaagaaaaccgggaggaggcggtgtgggaccgtgggcagacatcaacctagaccagcccctgtccccccttggctgtgtcagaggtgacagtgacagtggccttccattctctgcacccactgcactcacgggactccctctgcaactctgccagggtggcttcatcaccacctttggaggaggccgaggctccggctggaaaggtgcccagtctgggggggcccttctcaagggatctttgtgttttactgaagttcacggggtgcccccagccctacttggcatgcgtgttttctttgtagttagttttctttgtagttattgggatgccacgtcaagttggtcatttcaggtaaaaggtggcgtaaacactggagctgcagagaaaggaaggtgcttcatgaacactctgcagcggggtgtgcttcaaggggaggaagaacttagattataatgcttttgttgttgttgtttgagacagagtctcactctgtcgcccaggctggagtgcagtggtgcagtctgggatcactgaagcctcaccttccctgggctcaagccatcctcccacctcagcctcctgaggagctgggactatgggtgtgcgctgccacgcccggctaatttttataatttttgtagagacagggtttctccatgttgcccaggctggtctcaaactcctgggctcagcaatctgcctgccttggcctcccaaagcgctgggattacaggcgtgagccaccacacccagacaatattataattttactcttaaaaatctttatgaaagatgtaaatatgtaaatattgagatgtttagactattcaagctgtcaaagacaaaaactacccagaaacccagtactgtgccaaatgttgagaaaatctgtaattccaaacagtagcttctgatgatgtttgttattttaaaaattacaatttagtcctgggtacgaatgggagtatttcagcctttcttgagaagttcatcgaacttctagggcaggttcatgtttacagctgtgtcttcacgggggggtttgagaagttgagtcatcctcatttgattataagaaaatgtggtccatatacaccgtggaatactatgcaaccataaaaagaatgaaatcatgtcttttgcagcaacatgggtgcagctggaggccatgatcctaagcaagctaatgcagaaacagaaaaccaaatgccacatgttctcacttatgagtgggaggtaagcactgggtacccatggacacaaagatgggaatgacagacactggggacccccagagggagggggtaggaaggggagagggaaggagtgaaaaaaaaccaccccttggctactatgctcactgcctggagacggatccattcttactccaaacctcagcatcatgcaatacacccaggaagcaaacctgcacacgtacccccgattctaaaataaatttgaaaaaaagaagaatgcgagcatttcccattggtcacaggcccttcccacggcagcgtccagcacccaggttcccagccagggctgggcggggctggcattgtgtaggtaaatgctgcagtggtttacttggcatctgactaccctgacattttatgggtaggatttgtaccactgcacaaaaatagttttaaccaaaaatatacttgtgaaaaacagtaggaaatgccagaaagaccagacttctttacaatcaaagaattacgtgtatgtgtttttaagtggaattatctggaagagtggcacttccaaaagagtttccatgaatgagtgaataatgaagttctaggttaggatctcggctctgtaatttattatctgggtaaaccagggcaaattttttaatcttttaattaattttttttttttttgagacaggatctgtcgcccaggctggagtgcagtggcgcgatctcggctcactgcagcctctgcctctcaggttgaagtgattctcctgcctcagcctcccgaagtacctgggattacaggtgtccgtcaccacgcccagctaatttttgtatttttaatagagacgggttgcaccatgttggccaggttggtctcagctgcccacctcagcctcccaaagtgctgggattacaggtgtgagccactgcgcccagcctttaaccttctaaagctcagcctcctgttttgtggagtagcagtatctgcgcctgcgctgctctcactgcgcaatggaagcaatacagcacggagcttagcagggaaaggcatgagaagctgctagcgtggggactcaaggaacatcagcagtgtccttaccttcataggaattaaggccaaaccatttatgggtgactatgtcaggagaagggaggaaaaaaaaaaaaaaaccctgttcctgatagacgagaaactgctcaggggaaagaggacgtcgctttccatgtcattattcctcagccagggttgtgcggatgggagcgctggtcacttaagcacatgaagaagaaaaagtctttctgcgaaacatggacggagcctggaacatgcagggccacgcgtgagggacgggccgaagtcagggatgtggggccaggagccgccgtgtggggtggacccctgccagaaaagcaaacgggcagtggatggactatggtatgctatgcggctcacaagataaaagtttttttttaaaacctcccccaccccctaaagagatcattattgttacgacatagaaaaacctagccttgcagctgaggctgcaccgtgcaggcagagaccgtcgaggaacccacagcagaattggccatgggtgaaggctgagtctgcaccgtgcaggcagagaccgtcgaggaacccacagcagaagtggcccacggaggaggagcactgagccgcctcctatggcagcgacacagaagccaggcctggaaggcagagcgggagagcagagagacatgctccacgccgcaggcccagctcaccctccgactgaggcaggagtgctggagctctcggcggccggtggggacaaggaggaccccggcaggcgcgggcagggccggggcaactgggcaggaccccagggaactttggatacgggcagaggaaggtcttccagtcggggaaggcgggaggtgttaagatgcaagcacttggcagttagcgggctatgaggatcttttctatctcgaagccgtgcgtctttcacctgttgttcgactggtatgctctgtggctcacaagatacaagtttttttttttaaacctcccccaccccctaaataaattattattgcaatttaaaaacctagccttgcaaaacagcttttgaagaacaagggaaataattgctcaaagcccacttgctctacaaacaggtgatttcagagacctttgaaaagagccccagctgctgaacttaacctggggccccgcgaatgaaccaggctccgcccctgacgcccgagacaccgcgcacaagaaggcagtgctggatctcccgcagggccctgaagcagctctctggtgcactgaaaaggcagcaccacgtggtggatcatccacggggcagccccagggcaaacgtggtgaagccaggggtttgcgggagggacagccttgccggtgcgggggacgcggtctcgggactgacggcgcaggggacgcgcgggattgacggagcgggagatgcggtcgcgggatgggatgtgctccccgtagctcccggcgtggctgcagtgggccggttgcggggaagaaaagggccggtgtcgtaattgactggacaggtactaatgccgaccacatccaaatatggatgatgacgagcgtggtgttgcccacagtccaggcctgtccaggcgccattccccgtggcctgcacgctcctgggtcatgctccgctcaggcggctccttcagtgaagttgcacagcagtcagggtaacctccatgtccccaaagggcaagaccggctcagaggcgaggtaggtggcacgaggccacacagctggtcagctcagccgggctgggacgcgggccccagaccgtggcccccgtgcagctctgggtccagctggccaaggtggactttgcacaaggtttgggaggctaaagggagccgaggcaggtggcagctgctgtgctgggaaggctgcgtgcgcggggcatcctctcttggcccgggtgggcggacgcaggggtccctggaggacgggactggcatgtctcctgcatcccgcggtgtccttgctttgtgtccaggtccctcctgacccccgcccatccaccctactggctcagagacgtggaggcagtggtcccttccccagctccccacgctaccccccaacccttgctgcacagcagaaggccctgctcagaaaatccctgatttcacgggactcctagtggctctgcctcccggatggagccctgcctgcgtggctgctctgtggctaacaaacagcgtgctcctggtttccctgccacggtacgcccctccagccacgtcaggccattgctcaactggaggagtgacatcgctccttaactttcatacctaggtttatgtcatactttccaagttacacaagtcacatcaaataattccgacgtttcaagaaaaaggcaagtgactctattattcctcgtttctcttgggtctgaaaaatcatgtcctgtgaagcccttcagacctgcctggggttcgagtccctggatctgccgctccccccttccctctcctgggagcatcggtgcctgggcgccgtgggcgcaggcggtcggcattgttacttaggtccgagctaagttacgtctcctctgcccaaatcctgtcaatgcagcaccgtgtccaccatgcgccaagggagcctgctgggctgagatgcacctgtttaggcagcatcggggagcgatgttcctgaggagctgggaggccctgcttcctggatggactggctcctgcgggaactccggcaggtgggagaacccgaggtggacagaggtctgctagtgtcagccgcttggcccaggagcctggcgtgtccagtgtcagctccttgtaagcccatcagggccgcttcattaaagttgaatttaaagccagactttaaagaatgaactgctgtcttttcaaaggcctccttcaaatggaagacggacacgtgtgactcagacatgtggggctcactgtccggggcggcctggctttttatcttcagcggttgctgttattggtcaatgatgttggtgttcagatctgcaagttctggactcatgactttgaggctttaaaaattactttaacaaataatgtacgcgttgagaatggtcgcctgggcagcgattataatggaagttctttgtgttatatctttcaaaatgtgccagtccatgtggggtgctggtgctttggggcaccagcccctgcccctctcttggggaggagctggatggaacacaagtccagcactcacagaggctcatcctgagttgtctgcccagggaacatcagtgagaaccatagtgtaggaagagaccgggcgggcaaagtgggaccatccagcagcccctacctgtcagggggacccaccccttccttccagccttccctgttcacagagggtgctgcaggccgccagggtgctgtccccccaacgccatatcggcattcagaacagatgccatactctgctctaggggcctccttctgcccccacatcacccactgaatctctctaacaaacatcccccacgtggtgatcagtttcccacgtgctcagggggttctgcgccctgccccaaatcttacagctgatgtggggtagagacagaatcccacccaggtttggctcccaggagtgtgacccaggatgggacagcgatttgtgctttgcagagaagtgaactcagcagtcgggatgcagggtgcacgttctcggtgtccccacgttcagctctacatgcacgaccccaaacttcctaaaggctcatgacgcaaataaaaccacaagtcctgccctcgagagatcattatctgggcccagagcagctgctccacagaagtgcgaaggagaatgagcagagccagtccttcctgtcctctccctgtcctccctcccatcctccccacctcccacatcttccctgtgctccccgagtcttctccatgcccctcagccctcttctggccagatccagcctcaccccatcaccattgctattcagcggtcacagtctccactgacacctgctggggtacttgccttttaacaaggcatccaaaataagaaaaaacttttcagaatgcttgtgatttttgtatattgattttgtatcctgagactttgctgaagttgcttatcagcttaaggagattttgggctgagacaatggggttttctagatatacaatcatgtcgtctgcaaacagggacaatttgacttcctcttttcctaattaattgaataccctttatttccttctcctgcctaattgccctggccaagcattcttatacaccaacaacagacaaacagagagccaaatcatgagtgaactcccattcacaattgcttcaaagagaataaaatacctaggaatccaacttacaagggatgtgaaggacctcttcaaggagaactacaaaccactgctcaaggaaataaaagaggatacaaacaaatggaagaacattccatgctcatgggtaggaagaatcaatatcgtgaaaatggccatactgcccaaggtaatttatagattcaatgccatccccatcaagctaccaatgactttcttcacagaattggaaaaaaactactttaaagttcatatggaatcaaaaaagagcccacattgccaagtcaatcctaagccaaaagaacaaagctggaggcatcacactacctgacttcaaactatactacaaggctacagtaaccaaaacagcatggtactggtaccaaaacagagatatagatcaatggaacagaacagagccctcagaaataatgcctcatatctacaactatctgatctttgacaaacctgagaaaaacaagcaatggggaaaggattccctatttaatgaatggtgctgggaaaactggctagccatatgtagaaagctgaaactggatcccttccttacaccttatacaaaaatcaattcaagatggattaaagacttaaacattagacctaaaaccataaaaaccctagaagaaaacctaggcattaccattcaggacataggcatgggcaaggacttcatgtctaaaacgccaaaagcaatggcaacagaagacaaaattgaccaatgggatctaattaaactaaagagcttctgcacagcaaaagaaaccgccatcagagtgaacaggcaacctacagaatgggagaaaatttttgcaacctactcatctgacaaagggctaatatccagaatctacaatgaactcaaacaaatttacaagaaaaaaaccccatcaaaaagtgggcgaagaacatgaacagacacttctcaaaagaagacatttatgcagccaaaaaacacatgaaaaaaggctcatcatcactggccatcagagaaatgcaaatcaaaaccacaatgagataccatctcacaccagttagaatggcaatcattaaaaagtcaggaaacaacaggtgctggagagggtgtggagaaataggaacacttttacactgttggtgggactgcaaactagttcaaccattgtggaagtcagtgtggcgattcctcagggatctagaactggaaataccatttgacccagccatcccattactgggtatatacccaaaggactataaatcatgctgctataaagacacatgcacacgtatgtttattgcagcattattcacgatagcaaagatttggaaccaacccaaatgtccaacaataatagactggattaagaaaatgtggcacatatacaccatggaatactatgcagccataaaaaatgatgagttcatgtcctttgtagggacatggatgaaattggaaatcatcattctcagtaaactatcgcaaaaacaaaaaaccgaacaccgcatattctcactcataggtgggaattgaacaatgagatcacatggacacaggaaggggaatatcacactctggggactgttgtggggtggggggaggggggagggatagcaatgggagatatacctaatgctagatgacgagttagtgggtgcagcgcaccagcatggcacatgtatacatatgtaactaacctgcacaatgtgcacatgtaccctaaaacttaaagtataataataaaaaaaaaagagaaaaaagaaaaaacttttcagagccaaaggagagaggtgggagcatggtggccccaggcaccgcatgcagggaggggtatcagggccccccttgggaagtgtgtccctgcgtgtccaaggccctgcagccacaatccagccccgcccctgaaaagcatgttaggcccaggtgctggtgccggaggctaaccctccatcagagcccacagccgcccactcacggtcggtcacagggctaaccctccatcagagcccacagccgcccactcacagtcggtcacagggctaaccctccatcagagcccacggccgcccactcatggtcacagagctaaccatcagagcccacggccgcccactcatggtcggtcacagggttaaccctccatcagagcccatggctgcccactcacaggcacagagtccatcccaggccacagtgggaaggagagggagatgccctgaggtgtccagtccaactcaaatttccagccacatacaccatgacctctggcgtgatgtgccctcctcatttttctctcccttcccttttccaacaaaagctcagccctggtgatgacagcacagactccagctctccagaggcccaagacagcctgccccagtcactgtggccatggggcggccttcgctctgaggcacaggttggcggtggccctgagccaggctggtgtggcctcgagtcccttctcctagccccaaaccccacggcacagttggggatcctctcggctgggtccccaggggagctgcacactgagcctccacctccttttcagagttgggagcagctgcccccctggccatgggggaaggccacgcccctaacctgactgcagattaaattcttctggaaatcttagcctgcctcactgcttggtttcctcttcattcggaattaattcctcccttggatgctgagggctggtggctggtcctctcttcgcagtgcagtcacttgctggagtctcctgagggcaggagagccccggcagtggtaggaggaggctgcaccgggcagggttaggggctgctgggcctctgctgtgtggccactgccccatgtggctgccccatcccccagagcaccacggtgcccaccttttgttttcagagaagcaacaacacctcatattcagtctaacctgtgaccattttccaaacactctcatgttcgtttgatcttcatgatgtccgtgaacacagggaagctttagtcgcagccacatgagtggagcatgtggaggctaggagaggccatgcacgcaccctctaggatggccgtaactaaacacacacacacaacaaaaacgtgctggcgagaatgctgaggaatcgtaactggcacactctgcagggaggaatatagcatgatgcagtcgctgttagtgggtcctcaaaaaactaaccacagaatcagcccaggacccagcagttccaccaggggcatatgcccaaaagcaccgaatgcagtgactcagagagagattcgcacgcccatgttcatagcagcagcgctcacagaagccaagaggtgaggccacccaagcgtccaccaatggaagaaaagataaacatcatgtggtccacccacacatgggaatattactcagcactgaaaaggcagagattttggatgcaggctacaacatggatgaaccttgaagatgttatgctaagtgaaataagccagtcacaatatgataaacactgtgtgattccactcgtatggggtccttagagtcatcagatccatagagacagaatgtaggacagtgggtcctgggggctggggagttagtgtttaatggggacagacttccagtgtggaaagatggaaagagttttagaagcagatagtgatgatggttgcacagtattttgaatgtaaatactaccactaaattgtacatttaaaggttaaaaatcacaaatgttatatattttaccacaataaaaaattaaaaaataaaagagtgagagactgcgtgcctggcatacagcaggggacaggagccgattgtctgtcctacagctgggaaatgatccatcctgccattcatccatccatccatcaagcactcatccatccttccatccttcatccacccatccatctacccatccatccatccattgatccatccatatccatccatccatatccatccatccacccacccacccatccatctacccatccactttcatccatccaaccatccatcattcttccatccatccatccatcatgcactcatccatccctccatccttcctccatcatccatgcatccatacctccatccatccaaccacccatccttcccccatccatccactcactccccatccatccttcatccatccatccatccttcttttatccatccaaccatccatccatcattcctccatgcatccatccttcacccatccatccatccttctttcatccacccacccacctgtcattcatcatccattcttcctccattcatccacccatccaaccatccatccatctttccttcatccatccctccatcatccatccacccatccatcatcctttcacccatccatcatccactcttcttccatctatccaccatccctcatccgtacaacccatccatcatccattcttcctccatctgtccacccttcacccatccatccatccttctttcatccacccacacacccacccatccatccatccttcctccatccattcacccacccatccatcatccatcatccatttttcctccatccacccatccactcatccatccatccatcattgctccatccatccacccacctacccatccatcatccattcttcctccatccgtccacccttcacccatccatccatccttctttcatccacccacatacccatccacccatccatcatccattcttcatccattcacccttcacccatccatccatccttctttcatccacccaaactcccactcatccatccatccttcctccatccattcactcacccatccatcatccattcttcctccatccatccactcatccactcatccatccatccatccatcattactccatccatccatccatccacccacccatccatccatcatccattcttcctccatccatccacccttcacccatccatccatccttctttcatccacccacacacccatccatccatccaaccatccatccttccttcatccacccatccatccaaccaaccattcatccttcctccatccatccatccatctatccgcccacccatccatcatccattcttcttccattcatccatccatcatccatctacttatccatcatccactcttcttccatccatccaccatcccccatctgtccaccaatccatccatccatccatccatccatccacccacacacccatccatccatccaaccatccatccttcctccatccatccatccttccatccattcacccacacatccatcatccattcttcttacatccatccacccatccatccttccttcatccatccatccatcatccatctacccatccatcatccactcttcttccatccaaccaccatccctcatctgtcaaccaaaccatccatccatccatccatgcatccatccttctttcctccatccatctatccacccatccttcctccatccatccattgatccacccataaacaaacactttcactgaagagacacgggaggaatcagaaaaagctattctcagagcttctatcctagagaattgctggcacttgcagagtgtgtttggatgacttgggtgttcctcacaaatgcctgtgctgcgggtcctattcttttccccagtttatggaggagacactaaggtacccagaactgcaagaacttgctcaatgctccatagcatttggctgagacaccatttcttggaggacaggacattgaaatctcagaggctgggtgagacacagggccactttgcaggtggctctcgaaacacgtccccttggctacctccgttggggccttcaccctctacttgtagttgatggcaccagaaatggtcttttctgggcttatgtctctgtcttcctggccagctctcagcactggctcttgccgggtgggtggaatcctgtctgatgacccagctgggagtggcttgtccccctctggacactgccagccctcctcctggcaccacctagcaccatacaatagtcactccaggggctgccattgccacagctccccctgcagggtaggggccaggccttggcacgtcttgattcaaatcctggcacttgcagtgtagatgaggagctctgggcaaggtactgagcttccctggctgcagggaggttgacatgaagtagccaggctgtgctgggcacacagcactccacgtccatcatccatctgtggcttatgaacgccttgtaccagatttatccttggaccctaccaatttaaggggaccacggaagcttctgaacaagaaggaggggtttccctgttcctcctggcatcttggttttacaatgagactgactgccatgttatctgtgttcttaggataacccaatctttctctctccttctaccttgataatgatgcctgacactttgtacggtgtttgcctttgcgtacaaatggctgggaagtcctcacagtcacaccctgcagtaagaatgctcacgaatacagcagtaagaatgctcctgctctcccaggaaacactgcattggggaagtgagtgcccatgggtgcaagtcagcaactggccagggcgaccgctctttcactgccaggccagtctgccttccgtggtcacaggcgaacactgttctgtttggtgctgtgcctctgcagtgtggtgagaactgtctatactcctgctcctcttagaaacgctgtgtgtgtgtggaggcggtgggaaccagtggtcctggcaaggcctgccaggctcagacctggagcagagccaggccccagctgaagcagaaacttccagctctgtgctccttgctattttttgtttgtttgttttgttattgtttttaaactcaaaaggcaggtaggacttaggaggcaagaaagcccgcttgagggacattaaggacatgaaggcacagtcatgggacgcttccatacacgattcctgcttattgctgacaccgagcggtaaaaagagaattgccactgtgagtcacacactctgcagtgtggcgactaatattgatcttccaaacggtaaaaacaagaacaaactggaaagacaaactctacttcagattgcaactacttaagcatctttgtttaacaaaatcaataaaaaaagatttcactaacaagactgcaacctatatttgtggctatgaattccccagattgctggaatatcaaatccagagcacaggagatgcagagagagtgaggcccagcaagcctgttttacagtcaacggatcgtcctctgctcctccgagcagctcatctgcgttcggctgtgcgatctgagtgtgttcactgaagcacagcacacgggcagaaccgcacgctacatcctcaggctttgctttggggccaagaagcgacccccctacagtgacagagtgtggctccgggccggacgccccacgctggcctcccgttcccatatcccggccatgagagcacgcggccgcaacacttgtcttcaaggagccatgatggggatgacgtgaggctccccagctcctggagaggccaagggggctgcgacgccccagcccagccccagctccaccccagatgtttctgttcagaaacaaaatcagttacaaaaaaacctaaacacatcaccccacaagaaaagtcatttggaaaaatcatttggaaatcacactgatttccttaaaatataaaaaacattgatttatctcgatctcatccattctgcttaggggagcagtttctgctttaattgtagtgtctttctttagaaaataaggacaagtgattggggtgttttggcacccacagtgccatggcacctatggaggctttaaagaacaaacatgccctcggaagaagttactcggcgaagtcgacacacacatctctgagtcagacatttcctcacattgtcccctcatttgtcaacacataattactgtcaccgctgtgtgctgacgctggcatcaggttgcacgtgccagtcagcataaaaatatggccgtaatgttggcataatttttcatgatcatcttcattaaccacagcgaacgggaggagcgtttgcctgcacccagccatcgtcatgacaacgcctccaccgcggccagcccagtgtccaccgagggcagcggttgaatgtcctcattattccgccccccacacgctttgcccgtgccaagcaaggaccaacacatgccggtgatttatccccaggccactcccgacggcatccaggcttaaggcgctggtctgatttcacagtttaattactgctaatctgagaggccacagctaatgagctgccggcaaccagctcgccctgctggaattccacaccccttccctggatgactcccctcattgtcgggggggcagttaaggaaggtgtattgacttctaggtgtgacaggttgactaagcacctatggaaacatcacagcaatgtcaacaggcaaatggaacacagataggattttggaattcagccaccacaactccactgaagacagtatgggttgctgatacaccccagaccttctgcaggccttgggtagaagatgttgggcttggctttagccacgccacgggctcccttggtcctgcataaaacacacccacacatcttcaccaggatttgtaacagcacagcagacatgtcaccagcccctccacacggaactctcttccgcagctccctgtggctcagcgcgttcctgcctcccactccaccacagctccctcccagacctgcaggcttcacatctaaaacactatcccaggcgctcctcacctggattccctgggggctgccatgggcccctccctgccacccgcccctttgcacactttattcttcccaagacccggcagatggcctgaaagcacatgtggggctgtggcctctggtgcaggcatcatggcttactgggctttaggatacacaccccgacctcggctaccgcatccacgcttggccccagcagcccgtccggcctggggttctctgtggcttccttggtctccgagcctccccagcactttcacttcccgctgccaccggccccggtgaatgctgcttctgcttctagaacactgctctgcaatttagagatgaaattctggcacccttaattctatttgtttaatccagtgaatttaatttcaggaacatattggaaccatgcttagcttcagagcagagtttatgtagatagaatatgactggaggtttctgctggtttaagtgtgtcagtcacagaatgcatgatgtcagtataacaactacccttgcttaatgataacgctaattaaatattcttagcagcatcatgtggagaaactggattttcaattaagcactttctgaggtgagggtctcagcaggtcccacctctttacgttaaaccggaggctttctgctgttgtcaggccctgtgcacccagagaatgtaggaattatgaatgcgtgaagctaatttcttttcattttcattcaatggtatgtgagcttttccaaatacatgatcctactctctcctttggggagaaatctttgttaaaaattagcgctataggggagcttattttgcccaatgacagagcagatctgaaaaaagcatcaaatcttccttcgtatcctctaatacatccctccagctcgggtagacggacatcctcgggaagagcgttcagccagctccagacacagcaaggtcatgaggcgcctgcattcagattcattgctgggtgtgctgaagagggccacacattctctgacgcacttgcccccgaggtgagacctctgtcctccccacctgagtgtgggggctgtgggcccgcttggccagttgaggcagcagaatgcacctgcccccgaggtgagacctctgtcctccccacctgagtgcgggggctgtgggcccgcttggccggttgaggcagcagaagtaacgccctgccagtttctggcttctgggctcagactcgagagactggcagctcccatttcctctcttgggacacttgttcttgggaaactcgctgccattctgtgaggaagcccaagcagccttgtggaggctccacatgcagaggcccagagctcccagccacagccctggctgagctccacaactgccaccacaatgtgccagctatgtagacaagccctctttggggcgagccctccagcccccttggaccactccagctgatgccagtggagcagaaacaagacttccctgtcatgcctgaccagattatagagctgagagcaaaacagggctctccaatttgggataatttgctatgcagatatagattcctggggtacctgcccccccattccctgtctccatctctgatataaaactaatcccacctgctgccagttcatgcccttctgtggcttgcagcagctgacactgacacctctttgccaactcaatttaacagccacccaccatgtcacgggtgcagagtgctggatctgggactccacagagcagtgagacacagcccctgccctcagggagcttacaactgagtggaggagaaagacacacacggcacagggaaaatgtgctggcaaagcagtgcaaagggcagtgcacacacacagtcagagacacacaaacacacagacacacatgcagacacacaaacacacagacacacacgaacacacacagacgcacaaacagacgcagatacagacacaaacagacacacatgcagacacagacacacactcacagacacagacacaaacacacagacacagacacagaaacacacagacacaagacacaaacagacacacacggagacacaggcacacatgaacacacacagacacagacacaaacacacacagacaaacacacagagacacacacagacacatacaaagacacacatacagacagacacacacacatacacacggacacacatgaacacacacagatacatacacagacacacgcacacacagatgcacagacacccacacatagaaatacacacagatacacacacagaacacagacacaaacacacacatggatacacacacacagacatacacatacacagacagacacacacacagacacaaacacacacacaggcacagacatacacagacacagacacacatacatacacagagacacacatagacacagacacacacacatacacacagacacagacgcacacagacacccatacagacatacacagacacacaaacacacagacatacagacacacatagacacagacacacacatacacacagacatacacacacacacatacacacagacacagacacacacagatacacagacacaaacagagacacacatagacacaaacacagtttgtgagagccctggcccgcagaccatggtggctgcagtgtgagcccagcagagtcctgctcagtgctgcccagagacctggggcaggaagtggaaagaggcccctgatccaggtgcagctcctgctcccggaaccgcctgtgaacgactgtgacctgggcgaatcctgctgcgggcggcctcagctccacactctctctaggatgaatcaggtggagctggcacccagggcgaccccagaggacacacgaggctctcggcattgggtctcagcgttgggtctcttggccgggtctggggggacccctgtggggggtgggagaacatctttttgaacaaacacgtaaacacattgagtctttggtcgcttttgcatcttctttcttctctggcctctgcgccccagctcctttgtgcgaggtcccatgtgctgctaggccacgggtggctgtccagggtgtggcttggagccgtggagctggaggcctgggtgatatggtccaggctgcatgccgactccgggtgtacactgggtactggcggggtcttcctgggccgcctgctcccctgtaaatgggcagtgatacaaccagcttcccagaactcccagaactggatccaggcctgggtgagaaggtgccttgcacagatgtccacacatcatcctcagtgctgggaccatcaagatgctacagtttccaaccagcagctcatcgcgaggacctcgttctaggcactcgcagcagacggaggcaggggtcctccacctccgcttttctgacccctctctcttcaggacaagcctccttggtcatgctccggctggcctttagctgaggtttagctctacgcggacattagaagcacaaaccaagcacagccccttctgtgagtgggagtcatgcctagaaaacaaacaggagagaggcggctcccaacctccaggagatgaaaacctgttcttacaatgcgtgggactcttaccctgacgagctctgcagtccccacagacgcctttgctcaagcccacctgcctcttcccagcaccacccgtgtcttcatctggggagaagagcccgtgctcagttttctccatcagcccgctgcgagggccaggggcccctatgcactcaacatcagcttcacaaagatgtagtgggctgtggggccaggcggcttgctgtacctcccacccaagcccagggccctctcacccagactttggcccagtgcctccctctgtctgtgttgcctctgttccttggagctgtatcttcctcagcctcaatttctctgcccattggtgtctttgttcccgaacctcagcccccaggtcctggttggtggggcttgtgtccgcctcatccagttctggactctttgtgatgatggtaacaataactggactgatccaagttgaagtcagttggtgaatgaatcaataaactccaactgagagctctacacagcacatcctaagtgtcatacagagcactaagtaatttgctttttcatttatacctcacttcattccagaaagatgcatacaagttagcaaagtaaacacatatttaaaaagaggtgacaaaaagaaaacatagggaaaacaagaatgggaaataagttggagcctagaatgaggttagtatgcaaaacccatgacacggacctacttactaggagctggctacggatggggctgtgagctccctagctgccacggggaagagaggaacaggatccacaatgtctatatgacaaaaacagacaatctattttttgaaaatcatagctattcttaaattaaaaaagaaatgttccaggagtcctcacagagatgcgctgaatagaatatgcaccatcctccatgatgtctttatacaacagggcaagggaatgcctagggttgctggcctcaggccaagtaaaaatggctatgcaggagcccagcatggcctgggcatcatgcctgtcaagcctggtgaatcctagggtgggcctgcgagggtttagaagggataaaccacgtcaatattattcttcccaaccaagatttcactggaagttgagctgcagtgagtttaagaaaatggtaagccccccatctctgcacgcagttcataatctaggttgtgagaccacacaccggctcatgtgcacaagacagtgtgcgtggagggtgacagtgtcggcaaaagtgggctcagggctcagagctgtaactgcggttaaggggttaggaagctggccttgggctggatccaggaccccagagtgactcagcctcatggtacagcagagggcacgcccgacaggggaggtcttcgagtcaacaatgggaagtagaaatctgcccaagatgaggggaccagtccgagtggggaggcttccaaagatgagaggaccagtccgacgggggaggcttcctctagaggaaccatgaggacaagtcagagtggaggtaaaaggcctgaaataataactggtcaaggaacatggtctcttcttctgctacttacatgccagagtctctgaaagttcttgatgagaacagtgacacaatgaaagcaaagtcagggaagatgagaaggtggccttgcatcctaactgctgtcagcagagtctgagggcctgaaaacgtccacatgccagggagtccctcagtcctcaggaaggagaaacgtttcatgaaaacgcgaacagtctcggaacgcctcactccgtcacggcagtgtaggctcagatgtgacttgggaagatggcgccactctgcaggacgccgtgtgtggcaaccactcgctctcacccttcgggtctgcggcagctactgtcatatgagctgctctttagagggacagaaatccacaggaccccagtttccacccaaattcatgagccgcagtggccaggctacctcacctcaccctgctgggtctgggcagtccctattctcccataggcataacggggacagtgaaggtgcaaccagcatggacagggccgagggatggaaggaaaacaaacccttgcagttcaacccacagggcggaggcggcagcgtgagaagcttcctgaatacaggactcgatgcctcgaggagaggagcgtggagcacgcccggggcacatggggacacagcagcgctgggaaggcttcgtcctcgggagccggcgctcacatgcagggagtcgcccaggacagcaagcctgggtgtggggctgaggcgggcgcagcctcggggcagtccccacacaagggcaggacggagcctggacggaagctccacgccctggggtacctgctggggcatccagggtttcctgccccaggcccgggtcatggtgtcccccgcaggcctgcaggctgggttcctcacagggcatctgctcaccaagtaagcctggcgtggccagaactgtgtttcttgagttgtttgagccgtttctgttcatgacctacagtaacgccgctgtctctgtgatgctatagggatggtcagtgaggagaccgccgcaaaatgcagactcagaggtgtgcataggtgggctgggcccggggggatagccgcagccagctgtgtactcggaggtgggcaaggagtgaggcggagggggcgtcacctcctccctctcctcctcctcttcctccctcttctcttcctccctcctctccacctcctctctcctctcctttttcacctcctccctctcctcctccctcctctcctttttcacctcctccctgtcctccttctccctctccttcacttcctccctctcctcctccatctcctcctcctccttctcatcttcctccctcctctccctctcctcctccctcctcttcctcttcacctcctccctgtcctccttctccctctcctcttcctccctctcctcctcctccatctcctcctcctccttctcctcttcctccctcctctctcttcttcctcactctcctcctcctccatctcctcctcctcctcctcttcctccctcctctgtctctcctcttcctcactctcctcctcctccctctccttctccctctcctcctccctctccttctccctctcctcctccctctccttctccctctcctctctctccttctccctctcctcctctctctccttctccctctcctcctccctcttcttctccctctcctcctctctcctcctccctacctctccactcccctcctctggtgctgtggctttccctcttttcctcctctcttcctccctcctctgctcctccctcctcctgcctccctctcctccgcctccctctcctcctccctctcctcatgctctctcctccctctcctcctacctttcctcctcctcttcctccctctcctcctccctttcctcctccacttcctcctccctctcctccctctcttcctcctccctctcctcctcctccctctcctcctcctccctctcctcctccatctcctcctccttctccccctcctcctcgctcttctcctcgtccttcctctcctcttcctcttccctctcctcctcctccatcttctccttctcctcctccctctcctcctcttccctctcctcctcttccctctcctcctcctccctacctctccactcccctcctctggtgctgtggctttccctcttttcctcctctcttcctttccctcattttctttctccgcttttcctgttctcttttcaacacttttatcctcagtatcattttctccacacacaattcaattttagagaatgcttgcatttttttcacattcaaacagatccacaaattcttgttagatacacaagaaacacatacaagtggaattggaaacacgcccatgtcggtcgctgagttacagaaggggccatgcactgtgacttcctgatgccagaggacacgcagtgccccacactgctaagctcagggacgcagccttcctgatgccggaggacacgcagtgccccacactgctaagctcagggatgcagccttcttgatgccggaggacacgcagtgccccacactgctaagctcagggacgcagccttcctgatgccggaggacacgcagtgccccacactgctaagctcagggatgcagcaaggctctggcagatcctgcctgtcatgtcctgtcccccggacactatgaaagggcagtcccgctgcatcagggacatgcatgctcctctcacacatgtggattcagagctagggccagaaggtgtgcttaggcacagcagtcattcctgggctgctgacataattcagcgaacttcacatcccagtgggaagggcaggctcgctcatttataatcagtctgcatgcaatgcctacagtaaaactttgaaatagaaatgaaaatttctttattgttatttactttaaaagcactgaaagatccaccagaataagatgtctgctgaaaagctagtttctttcaaccactgctgaggaaaatggtttaatccataatattgatgcataattgacttgtataacattaaaggacctttagaaaaatctttacaccacagcaaaaaaaaaaaaaaaaataccccaattcaaaccaaacgagagcaaaaaccaattcagacaggaaccactgaaggaattaaaagttacagaaccagagtctaaagtgagcacagcaaactccgcggtgacaccagagctccaagaacacacagactccctgttttcctccctggggacaggctaggaagtgaggaaggcaactgaccttctcaaaagccaacgctccgcctgcatggctcaggctgacgactaaacatgtccacgtgaatgcaggcgtcgaatgcccaagtacatgtgaatacaggtgtcgaatgcccacgtaaacatgtacatgtgaatacaggcatcaaatgcccacgtacatgtgattacagttgttgaatgcccacgtaaacatgtccacgtgaatacaggtgttgaatgcccacgtacatgtgaatacaggcatcaaatgcccacgtaaacatgtacacaggtgaatgaatacaggtgttgggtgcccatgtaaacatgtacacgtgaatacaggtatcgaatgcctatgtaaacatgtacatgtgaatacaggtgttggatgcccacatacatgtgcattcaggtgttgaatgtccacataaacatgtacatgtgaatacaggtatcgaatgcctatgtagacatgtacacatgaatacaggcactggatgcccacgtaaacatgtccatgtgaatacatgcactgaacgcccatgtaaacatgtccacctgaatacaggtgccgaatgcccacgtaaacatgtccacgtgaatacgggtgccgaatgcccacataaacatgtccacgtgaatacaggtgccgccgaatgcccacataaacatgtccacgtgaatacaggcgctgaatgcccacatatgcaacaagtcaatgtcttcctatgccactgctctctggacagaccacattctgaaaacaatgatgaagccacacagtgctcagctcaagtcccaggaacttcctgctttatgctggaaacgggccacagcgctcaagcagagctccgctcacagccaggtggccgtgttctctgaggggttgtgccggggtcttcagacagtgccctccctggggtcttgggaccctcaagcaaatgccacctagaagcaaaacctgacttaggtcaccaggtgcaggccttacatatagaggtagtagcgctacattgaggatgctggacacggcttatctcctggaggagggctgcctccttgccatgggagccccgccctggctgccaggcttccctgggcaaggtcagcaaggcatgtgctcggtggaggaggcctaactgttgctactcttggtgacctgaggtgaaaggtcacgtgctggtcgcttgtgctgagcaaggccttgcttctcatctgaccaaagaagaccgtgtttcctgggaccctgcaggctgccagaatgaccgcccacccgctgcccctcaccacacactgctgcactgtgctccacatcctgacaggcagcaggaacccccaaattccctcctcaggccagtgccctccacgttgtccccagcagggcgacggagggtgggggcggcaggctgtctccggtgcttgccttctctgtctaaataacttgcttctcaccctgctgcaggagtctccgaagcacaaaggctgaccctagactctggccaggacgagctggggtgaggggccccggccagaaggatgtcctgatgaggggtcctgagggtctggggaaggcgctgtggcctgaatgctcaccctatggctgggtcacccagggcaccccgaggtcatcagcctgaggaagagtgctgggtgatttcattctccctggttgctgaaaatgagcagtgtgtgtcctcccaagcagggctgggacgccactgataccatcgacgtacaacacgccgcaagcagccctcgaggaatggaaaactctcagactgctgtgtccacacgggttaataaaaatgctgaccccagttcccaaggtccacaatgtccatggagagtaggattttacacacttattgatgaactgctatgagtttttgatgatggcttggctagttgaattctgattcgatactttataattagggctcactagtgacgagcaaaagcccgtgaaactgtctttgtttatgatcccaccacgtatctctactattaaagaattagcctctgggccgtgtgtcctcctggtctacctccagcacaaggacgttcctcagagcaaggcatttgctcgctccccttgctccttacacacggccttcccactcccagctaacacctgaaataggatgggatagtgcacactctgaaggtgaagctttaggtgacgtcgaagcatccagccatatctgtcagtttatataaggggtggcggctgctcagcgaggcctcaggagtgtgaaggaggcttggctggcggaggggccgtgctgctggatcagatggcggaacacggcccagagcaactgaagttcgcttgtccccacaggcagctcgacatggtgcagaccgtggcagccaagtcaggcatacagcagccctcttgctggcttccagtactggctctgcacgccttcaccgtgagaggcccctggacaagggactgccttcctctgtgcctcagtttccctgtttgcacaatggggcttcacccatttcgcagggtggtcacgggtattccctatgttggaatgcatgatggggccacacccagcacggagagagcacttgacactgttgcttgcatgtgcccccgggccaaggtggacgagctctccaaactcgctttctctgcctcatccgtgatgagctgccccgcgggtccccacagatcaatcaggacagaatactcactaaccaaaggtcggtttcacttctctcctcagtgcacacctgaactctcaccacccccaccgaggcagtgggcagcccctgagccaggcagctccaggccaaaccttctctggcctcctgccgctcacggccacaatcaccccacatcctggtccactcacacccacgtcacccacatgcggctccttctagccatgctcactcccctctgcggaacaagacaagggctcccttcgcctggctgtggtagtgcttgcggtcctatggccagagcactgccctgccacagccctgaccccacagcaccaggccttttgatgaaaagtctgtccttcccaggtccacggctgcttttgatttgatatattacacatgggctagtgttattatcatctcctcaaagtggagggtctgctacattaccgcctggacatgtccggaccaaaacatattttcagaataacacacagttaaccctccctgtgccaagttgttgatgtcaagtctctttgaggacagtgcttacaacatgcgtgcccttcttctggtcccagcaaatgcagcaaacaccatcgaatcaggccagactcgaccactgcaatcaattcttctgggtctgctctcagacttcaaggtgagatgaatctgtactaagaaaacttccactttttcaatactatcccagagagcctggttttattgtcatgggttcccatctcatacaagttcgagtatgaagcgtgcagctgggagagctcctggatggtgcatggcggaagcttcctgactgaggacaagctgacccagcttcctcccaggttgctttcttgccctcagtcaaatcgttatttctgcatctttatcaagtcatctgacttcacagtacccaaaacgtatattacttcagcctcaataccctgccccagcctcccagccagctccaaatcacatcccactgctgtcgctgacttctgtggcaaaccacaccccactgactttggcagcagctgtcagccctttctgggctttcaggggtggatgtgaaatgcccacacagcagcttcaggcagatgcccatatgcctgagaagcttcctgcattttcagccaccactgtcctccaagcttgccacagacgggagtaggttcccaggtgcgggcacacaggtatggcctcgcctatgctatctctttcactgtccctagggaatagacctgggctggctttgccaaaggtgtgggtggatttgccctgatggcttacccaggcctcgcctgctctgcacaggaccgtagaccccatgctgaggggcggccacagaggtgtgcagtgcaaagccacagaccaaactgcaagtaatttgttcatgtaagaattcagctcatgagctcagccctggcacaggctccagtcaaccacgctaagtgggtctggactcaggcatccgagaattaatggggccccgggttgggatgcatgcagtgccaggcggaatcggttccagcaggcgtctgggagggccggtttggccccagtatctgaaaacggtgaatcagctctaagggtaggagctgcagcccgccctccacagagggggtccagggcttcttactgatcatccaggcatgggaagctgatcagggtcaacctatgaaatcacacatcccagttatgttgtctataatcttaacagaaacagcagaaataacctgagagagaggagccatctaaaaactcatacatgtataatataccaactgcccccaggggtccctgaaagaacgacgagtgtcggtactccaagaaattatttggaaaatgactacccaagagatgatcacacagcatcgcatcaacattcaggatttctttccagcacaaaaatgcccagtttggaaagaggaatcagaggaaaatggacaatgaaaataaaggctttgctctctttccttaaatagtagaggcgctgggatgacagaatgtgctggctgcttgactcggggagccttgagtgcactcggtgctggctggctaacatggtctgactgtgtccccacccaaatctcatcttgaattgtcccataatccccacatgttgggggagtgacctggtgggaggtaattgcatcacaggggtggataccccatgctgttctcatgatagtgaccgagttctcacaagatctgacggttttatcatgggcttttccccctttgctcggcacttctccttgctgccgccacgtgaagaagaacatgtttgcttccccttctgctgtgattgtaagtttcctgaggcctcctcagccctgcagaactgtgagtccattaaacctctttccttcataaattacccagtcttgggtgtgtctttattagcagcgtgagaacagacgaatacacctgccttggcggtgctgtgacacgtggcctgttactcacgttcccatctgaatatgtaatgcacaatggacactcccatgcacagcacaccgggagggtcctcaccacacagcctgggacatacgtccatccatacctaggaaggttcatcgaacgcatgtctgagcctgatgttcctcggcactgctggcccaagaggagctgacagcccacaatcctgaacattaccttgtgcttatttaatctagtatgaagtcatcttactaagaactccactaattctgagcatgcaggggccagcggagtccatactaaagttgaccgatcctggctataaaaagttctgcaaagaaaagtatggcagtaaacaagattccaggagccctcttgaaacagcagagaagacgccctggcaggaaggcctgtcccacctgtgggtcctggattcagcctcccgccccactcccacttactcggaacagggactttcccatgtggattcgtatgaccctacttttgagtgatttcctccggaggctgttcacatttcatctttgctccaggccctctgaggcttgaacactgccctgttttcattcaagaagaaaagtgaaaccaggaaggcaggtgtctttccagagggctgggaggctggttgaatggaggatattccatctcttactctttcaagcagagcgcagctgctgtcccacaggagtaaattcaggatgagtggctgaaacatttcccacatggttggagtttaagtctctcaaggtagagacactcatggtgtaagtgcagaggaggagaaggaagctgggatgggtgtgtttagttctgcttccagggactattcctaaattctgcttgtgggcagggcacaggcagctcaacgttaggccagggaccaatcttaccacgtggcttctggcccagagcagctcgtgagtcagcctggcctagttggaaaggcaccaactaggtctcaggaggccaagtggggggcctgcccccacctctggggtctcagcatctgcacagtgacggattaggggggcggttcagcagcccctcgaaccttcacccggggctcgtttgctgcttcacactggaggaggtgctcctagcaagatgccgacctgcagcagcgcccacaaggctcagggctgggtccagcctcacctgcaaaagctgtggctgcgggaaccttcctgccctgcaggaaccacctcagcctcagcctcagcgctggagagaaagccctatcccgctcggcctgaccctcctctccacaaagggcttgaagagcaactgacccatgaaacgggcaggggctgggctgatcccatatgaaacgggcaggggctgggctgatcccgtatgaaacgggcaggggctgggctgatcccgtatgaaacgggcaggggctgagctgatcccgtggcagtgcaaaccgagggccccctgggtctcgacatttcaccgcaaaccctgaccccacacccggcctctctgcagctaatggaaggaaatgaacccatcgtgtggggcgacataggggcccagggggcctggacaagtaataaggtcaagatatttttggacttgttcaaatgggtgggcagctgtttctctgaggaaacgcgcccctccccagtggccaggtgagcagtggggctggagaggagagcagagggagccgaggccctctgtccaggcggctgaggtcacgcggtctcttcagtttccatttttccacttgtaacggctgttacagccgctgtttcatcgcgtcgtcataggagttgaacaaagctgtgtgtgtgtttccagaatgttggcacagcggcgagaaggctgaccgaacaccgagaagcagccagcacaggctctccacaggggctctggcatggagcaggataacccgggcccacgtggggacacgccccgccccacaggcttgcaccggggtgcggcctgccctgtctggggcgccaaggccagtggtgtaaatccacactctatggtgacggtggatccacagctgccgcgggtccccccaaccccaaagccactgagtgaaaacagaccacggtgctccaaaacgaaatcgcccccgaggatgaaagggggtggtggaaaaggccttggagcctggggcagggctcagaggggccccaggccggccccactcccagactagagccagcactcgcgggcaggcctccccaggaccagagcgcctgcgacctgcctgggtgccatccgcaaacctggtctctgctgaaatctgaacagtctacactggacagacatggagggaagcttctcccaggaccagggtccctgctttctgcagacggtgggcagagggcagagacggagaccgtgggcacagcacaccaagggggagcctgctcagagatgggcatggggccggcctgggaagcatggcgggaggggagaagaatcgcgatcctttccaggtacacagtctagcagctgccacgcccggctgggagctgagacgcgcagggggcccagctgaagcctgcgttttcccttctgcacaacagcggaggttttcctggagttcataatcactggttttttttgtgtgcgtgttcaccagcctgctcacctgggtagcagggtgggagggccgggtggggatggctgcagggaccccctgggccggctctgggtgctgctgctcccaggagagatggtcccgtgcaagtgccaggcccctgctgtttggcctcctctgccccctgtggggcacgagcgttagccgcactccgagtgcgcgccaagggcttcagctggctgagcgcttttgctgtggggtggatcccaggccctcgggccagccctgcgtggggttctccctgctcacacaaaccacacggggaacggcacaggtaatattaaccaggactagcacctagggccccacaggtaccgttcacgtatcctggctttagtcttgctggttttctcaccagcatttagtgctagttcagtatttatttaaatcaacatgttttgaaaaactgcctaagtatctgaattgttataaagtttaaggaccatgaagtctaagaaggaagattatttattgtacttctgggaaaagcccccagaggtgggctcatttgctgtgatcttcgtcccattcacaaagcactcctgggcactgtcccagctgtggatggcactggaaactgggcttgtccacagcgtgagtcccttgaggctggaagcacagagtggctgtccccaggtagttggtgacggggtgaggaccgggctcgctcccactctcaggagcctcactatggtccccagagatagaggacggtgaggcgctgccggtgagggccacaccaggccacatccgtgcagaaagcaccctctcattgcaatgtgtttggaaacatgaattcatgtggcagcggtaacatttagaagagaaacagccacatttaaaaacgcgtaagactcacagaacctcagcctgctgtggtttcatcatcaggtgggtggcacattccagcggctttggccttgcctgcccagtgcccagagctcagtgcccactgtgggaagtgcagggagcagctctggcacatcccacagtgctgtctgcaccaccgcacacagagtgccagtgtcagctgtaggtcccatggcctgaggaagccactgagcctgggacagcttgaggggcaggaggcggacacaggtgcggcgggggacgcgggggtggctgcccgggaggcggacgcgggtgcggcgggggacgcgggggtggctgcccgggaggcggacgcgggtgcggcgggggacgcgggggtggctgcccgggaggcggacgcgggtgcggcgggggacgcgggggtggctgcccgggactggctcttctggaagcaattcgtgggaaacccacttggatgccacttatgacccccgcgtgccagtggatgcccacaacccctctggggtgtcggggatcaggtgagcaagggggctcatccgtggcctccaggccccaccttgatggaaactgcgacaggagggggtctggcctctgctgggagtgacatctgaagatgccatagaaagtctggcgcagcagccggtgggcctggggggcgcgtggactcccagctgttgctgtgcctgggtcaccccagtgggcagggcgggcagggggcttccccacagtctagggggccaggagagcccctgggcctcacgtcctgcttctctccttgtccttcatgtcttgtaggcgaccccacagagagagaggcagaggagagtggccgtgacctggaggacaaggacatgcatttcacactgaccggggcctccctgggacaccctgaacacctgctctgtgggagacggggtggtgtttgagctggtgccatctgggtcccctggggtggtggctgggtgagcccagccccatctttccctcggacttcatttgtgctcatggctgggggaggcacctgggggccccgtccaagctgccaagggctggggtgggctgttcccctcttggcatctccctcacacctctgcacccccagtggataaaagctgctggcaacatcgacgtccccaagacactgacaggcctggaggtctggacaatggggagccagcaccgggtcccctgggaaccacgcagccggggcctggaggccgacacaagccagacccagcctctctgccattcgcaaatcccagtgttcaaacagagttctgccaaagaagagaagaaccagtaaaaagcagggaagaggctgggcgcggtggctcatgcctgtaatcccagcactttgggaggctgaggcgggcggatcacgaggtcaggagatcgagatcatcccggctaacatggtgaaactccgtctctactaaaagtacaaaaaagtagccaggtgtggtagcatgagcctgtagtcccagctactggggaggctgaggcaggagattcacttgaacctgggaggcggaggttgcagtgagctgagattgcaccactgcactccagcctgggaaacagaatgagactccatctcaaaaaaaaaaaaaaaaaagaaagtacaggaagctttcagcctccttggcaagacactgctgtctggagaccctgggagaagtgtgccatcaaccaacgtgaccagaacccatcctggtttagggaggagctctccacaggcctccacggggctggagcagtccccaagctccaaagagtcccccacgacctcttagtcgtcacccctaggaagggcctagaaggcagatttcccaccatgagaagccacatggagcccagctcccaggcatgcagccctgctgggctatgcggggaagatgtgtgctctgaaggcctctggggccacccaactgccatgcaggaggcctccggggccaccccactgccacgcgggaggcctcgggggccacatctccgccataggggaggcttctggggccagccctctgccacacgtgaggctgccggcccacttctctgccatgtgggaggcagccggggccacatctctgctatgctggaggccgctggaaccacctctccaatgctggggatagctccctggagccatctcctttctcacagaggcgaaacccacaccttccccaaggaacggagctcacgccccttcctgcctccatttcccaagctgtcaccgtaacagtcactacaggacagtcagaatggtaggatttgagctaaattgctagaattagagagcgtcacaaaaattctaggaggtcagcaactttaggtaatgcccacacctgatgggggaaatcactgtcttccggcgggctggtcctctttggtgacagatgaagtcagatgcttccgggatgaatttggttcacctttgaaggacactttgaaagcaacacaacaaaactggctgggccttgtactctccgctccctcgagaagctccccgcccggtgccgctggcttctactgtttctaagctgcctgttgggcacgttccctcctggtggtcccggggcagccagacccaccctgggacatccaggccccctgggcacagacatcttgtacaaggtcagagagactgggtttcgggcttcatgagcctcagaaattcagctctcaggaggctcgtgggaggcctccagggtcaggtctctgccggagagaaaaggggcggcctgggcttctcttcaaaagtgttacctgacaacaagggaattcagccacacaccaggtggctccgtggtcccctgaggtccccagcctttgacagtgtgtgtgtatgtggtgtgtggtgtgaaatgtgggtgtgatatgtgtgtgtggtatgtgtgcatgtatgtgtgtgggggtatgtgtgtgtggtgtgtgtggtatggtgtgtgtgtctgtggggtacatgtgtggtgtgtgtggggtatatgtgtggtgtgtgtgtatatggtatgtgtgtggtgtgtgtgtgatgtgtgtagtatgtggtatgtttgtgtgtgtagtatatgtggtgtgatgtgtatgtggtgtgtgtagtatgtgtgcaggtatgtgtgtggtatgtgtggtgctgtgtgtgtggtatgttgtgtgtgtatggtatgtggtgtgtgtgtggtggtgacatgtgcgtatggtggtgtgtgtgtggtgggggtgtgtgtggtgtttgtgtggtgtgaatgtgtgtgtggtgggggtgtgtgtggtgtttgtgtggtgtgaatgtgtggtgtgtgtgtgtggtgtgtgtggtggtgacatgtgtgtatggtggtgtgtgtgtggtgtgtgtgtggtgggggtgtgtgtggtgtgaatgtggtgtgtgtggtgtgtgtatggtggtgtgtgtgtgtggtgcgtggggtggtgacgtgtgtgtatggtggtgtgtgtgtgtgtctgtggtgggggtgtgtgtgtggtgtttgtgtggtgtgaatgtgtgtggtgtgtgtatggtggtgtgtgtgtgtggtgcgggggtggcaggatgtcattaacttggttctaaaggtggtttgggttcaggtcctggagtacatgctcaggaactgtcaagcaatctgggggcacaggaaggagaccgggcgctcctgcaggtattaaatcgtgttttgcgtgaagatcagcgttcagaccagtagtacaaaacagatggtctaggaatgaacgtgacaacacaagggcctggagtgtatgacgaagggggcatttcaaacccgtgggtacagaaaaaatccacccgataaacacaagtgggaaattgtgtaagaaaatgaagtgagattccaatattaaaaagtcagataggtcaaaatctaaataataaacaatttaccataagataattagaagaaaatataaaatactttttaatcttgggttcaagttgtcacaaaacctaagctattttttttaatccagaagtattaaaagtttgctatttcctatagacaaatagctcctacaacttggtgaggaaacagggtccaggagcattttctctgctcgggtgaagctcaggggaagacataagtacatgaaagacattccgttctgtaatgattaaaaaatcaaaagttaacaccatcacattggtaaacgttaaaaggtttaataactttttttaatatactgctgttgcacatgcaaactgataaagcctttttggaaagtaatttggcaataaaaatgcacatactttatgagcaaaaaaaatcccgtttcttataatctaattgataagaattatagcataagtgcatgtatgtgtatgagaacagtcactctggcatcgcctgcaacagcaaataaatgagtggcaaacaagctctcgcggagggtatttaaatattttatgtgactaagaagaatgagatacgtccatttgctgtgataagaaaagatattccacagtttcgtatttgttaagtattttcagcaaatcatggaacacgatgcaacacccgattccatgtttgaaaacagaacagaacaaaattcaacaagaaataagcgcccgcgtccacatattctcgtgcctggcgtgttttacgtgcttgggaagcggagcggccgctgggcttggctctgaggtcgggactggtgcaggcggatgcatgtatgtgcccgggtcccgcctccacacgcctgcctggcgccagcctgcctgtcctccctgcacccgcccccgctccctgcacccacctgccccccctccctgcacccgccccccctccctgcacccacctgccctactcagggtggtgagagcggaggggctctggggcttcatccacacgtctcctagtcaccctctcgaccaagagcatcctctggattttacattcacttggcaacaaaaaaagtttgagagaggactttgaacatcaaaaatgcttacatttgttatgtcacaaacacaaagcgttctcctaggaggtttctggtacagaccatgtttcctgaggacctggagggtatcgcacctacagccagcaacgccgtgcagcacgctcggagcgcacccaagagggcagatcagaggggcgcacgcggatccccaaaatcctgaagatatgtacggaaaatatgtgcggcttttcctgccgaccaggcctccacgaagtgcttcgataaaataaaaccagcctgtcatggaggagtcccctttgcccggagagcctgtccttcccctctgggggtcacactgccagtttgtcaaagttgggcgaagtggcccctgcctggaactctctggccttatgaagccccctccccgttcatgccgctcaatcgagtgactcttacagatcatcttgagctgcctcatggggtggggctcgcgttcccatctgccttctgcaaggtgtggcctctgacctgcagcccgcactgagccagcaagccgcgggagaggccaggcgcccgcagcggggcatctgcgcctggtgtgcagcgtacttgctatactcaggccagcccagccctgggccatctccctgagtttcagctccccggggccacctctcctgggtcccctctttgctgtggctctggcggacattagccagcagtggagagaagcccatctccacccccagggagctcagccgaggtctccgcgtcccagcaccagctgccttcagctcgagggtgtgttttcgggggtggggatcccacatggcacggctcctgcacgtccagggcatctgctagtcgtctttgcctgctccccagtgtcccaagcaactcagtaggaccttggggaagctgggtgctcacagaacaccttgtaagcgaatgaggaaagcaggcttgtccgctggccacactgcacgacagacgtctgcccaggctggggccgggggtctctgctcctacagcccgcagatgggccacccggaggctgccccgtgatggctggacctgaggctttccagtgactaggagggcttgggtacttcttattcatgagctgtacgttctacagcgtggctggtcatttaatgtgtgcaatcgatgggcactgcgcttcaacttcaaagcatgaccgggcggatcaatctcccagggccgcgggtgccgagtttaaaactcatctctttttctaaagtggaggcaagggaccccagtttgggattaatcagcagtgatgagcttaaataaatgagataaattttctatctatcttgtaaggctttttttcagaattaatgggacccctctacaatgcgctgtgcccggggagaggaagggggcgcagctgcatctgcagctgcggttgtggtcgggagaatgagggcctggagctgcccaggacgggctcaggcacaggcacccagccgagagtcccctgctgttccctctgcagagcaaacacagtttctgctgaaaagaatgtggcagatgaacaaaaattgtaaggttttctaaaggtgtttcattacgtgagatggcagaggttggtctccatgtcacagatgaccctcgcggcggtgataacctttacattttggggtgctctgtggaccccctgtgtaccctgtgagtatgcacgtttctagaggtggagtttgacccttgaattgttcaaattataagtagaatcacagaaattgggggaggaaaggatctgaggggcctccagggcccgtggcttcaccctggggtgggggcaagggcggggcgtggtgcctcttccggggtgggatgggtggatgctcgtggttcattcccacgtgggattctcacatgctcgccctccggctgtcaggagcaatggtgagttctgccacacgtggaaaacacgttggcttctctgggttttaagtgtcctgtcagcagctcggagcctctaggagacaccgtcccccagggccacgtatagatccactggaggcctgaatggcataattcgtggcacccctggcaccacacaggggtgtttctgtccccttctcctcccatggcttagaagcagtaatctcctgacctccaggcagaagtcaatttcctcctttgcctcctccgccttgcagggaccccagggctgacctgcctccctcggccccctctctgccagagccaggtctgaggtcaaggctttcggtgtttctgaggccacgctgagggccccacagccccttcccgggtccccaccctccaggccaccttcgggcctcggcagcacacctcgaggggcccaggacaagctcggggcccaggtggccgggagggggccgcctgtgtctcgcccctcattctctgctctgacccgggctcgcacctcccctcgttctctgctctgacccgggctcgcacctctcctcgttctctgccctgacccgggatcacacctccgacccgggctcacacctcccctcgttctctgctccgacccgggctcacacctcccctcgttctctgctccgacccgggctcacacctcccctcgttctctgctctgacccgggctcacacctccctgctccacccaggctgcctgcacttccggttctgcgtctggccggcctacgggcactcgggcagtgcggtgaccaattatagcgtcgacgatggcagcttccctctgaaagcccattgtgtctgcccctattctttgaagcttcactgctttcggataagtatgaaaataggctctccctctctgagtcaaaggaggcaattatacaataggactatcaccctcactgtcactctccgctttgtttaaatgtggggatttcatttcttcatcgcctctgtgaacacccactaaaaccgtaagtgggaaaagtgggtgccttctgtattttacattttttattgtgtcacttactgcaaagcagctcaaggagcctgaagacacccagcctgaaaccacgataaatgtgtggagttgtggagacagctcaccagcagaacagtgagctaccttctctcccagtaaccttttccagaggaaacctctttgaaatatcacaagcaaaatttaaatcacaaaatacttcatatctgcctgcactcattgtcatgctaaagcacatcacctcggtcctcagagaggagggatttccatgtgaaagaggccagagtgcttccctcacttagcggggatgcaattataaagtattgaaacttcctctaagacatggatccctgtgcgtcgcagcccctcacctgtgcacctgggaggcacctggggatggggtgggggtgtcaagcttgaagcccctcacctgtgcacctgggaggctcctggggctcaagctcaaagccccctcacctgtgcatctaggaggcacttcggcggggtcgggggcggggggggctcaagctaaaagcccctcacctgtgcacctgggtggcacctgggagggggactcaagctcaaagccccctcacctgtgcatctagggggcactttggcaggagggagggtgctcaaactaaaagcccctcacctatgcacctgggaggcccccaggagctgcagcaaagctgggccccagccacagcctgcaaaatctccgactccacatggggcctcagcaccgtctgtttgctcaccctccccagggggctgaggctgggaaccactgctctttaactctcaacctcttcccaaggtgctgtctatctgtggcccttggagttctgtactcggcagtcatttatttacaagtcgcatgagaaagtccttccagccactttctgtgcttgctctgacatttgcccaaactaacgttgctgaggttgacctcatgtttattcagggaacttgattcattttcaagctattgataacaacaaagtcctccccaaccaaggaacttccgccatggaggcgttttcaaaagaaagtgcttgtgctcatccccagagggttcctgagcctgtggacgaggcgggaggcgggaggtggaggaggtggcacctggcagctcacctggtgtaccttctgtgagacccagccagcccatcggtcaccaaggggtgcatgtcacaccctgacctgcctgacggagggagcccatgaagcagaacaaacacatgtgatgctgacgccctcagaaacctggggctaaggccacacctgatcaccgtgatggaggggggcaggcgccgaggcgaacttgggagaggccctatggtgcacacccctacccttcctggctggagaaaaatggcccgccccgtgaaacagcaaataaacacacgcgttccaggacgtgagatacggcctccacatcaatcagagggacctgcccagtcctgtcaattttccatctaaattacataactgtcctccttagagacgcggggatgcccaggcacaggcatgaaagatcggccttgaggttattttgtctctgcaagtattgatgcgaggacttgtggcgcttttctttcccggtgaactttcccaactgctgatgttacgtgcactaagcacatgattttcctattcattcccgaatctcacattttaccgggatggtgacatccctgtggggccttgtgggctctgagctcatctacacccaatcctagtcagctctgctgcccctgcggggtaaactggcagctctgagttcactgggtgctgtttactgaacgcctgcccatggaagccactgtcctcatcactgggaaaggcgcagagaagagaaggaaacgttaaaaatctggttggagagaggaaacaaacttggaccatctttgacagtggtattagtccattctccatggctacaaagaaacacctgagactggatgattctaggaaagaggcttaatcggctcagagctctgcaggttgcacagggagcacggcagcttctgcttctggggaggcctcagggagcttccagtcacggtggaaggcgaaagggaagcaatctcgtcccacggtgggcgtaggcgcaaggtgggaggggctacccaggtttaaacacacgggtctcagaaaactcactatcatgagaacagcaaggagagggtggtgcaaaaccattcaaaaatcacccccaagtccagtcaccaccccccaggccccacacccaacactggggattacggttcgacaggagattttggggcacactgatccaaccatctcaacagcaaagagtgatctgcctcgagttccgactcgccgctcagacgaactcacggctcagctgggagaatcacacgggaggggcccatgaacgggcactggggccacagccggggattcaactgcaccgaaatcccagccctcaacacggcccacggctgtgtcatcccggatttatcactataaagcaaaaccaaaaacggacctcaggtttctctgcaatatgtaggatccgtgaaacctccaacgtgaaatgagaagtaggtagcctcgaatctgcacccaggcagccccaaaggctatctgatgacaacacacattttctcatgaagcggaggagagtccggccttgttgctgggcctgcaggacatcccatcgctcatcttaattctcctgagggtgatatttacacctgatatttacaaggtgtggcaagtgagaatttcatcccagcctcctgcctggcaggttacacaagctggccacagggatgcttatgggctgaggtcgtgggaggcatcccgtgagggtcacaggctgaggtcgtgggaggcatcccgtgagggtcacacaggcaaagactgtcagccaaaaggaattccaaggcccggacgggaggcggccacaggctcctgggtgtgctgtgggacgtaccactcggtggcagggcctggccagagagctgccctgcaggcctgtgggatccttcaacgcgaagcttgcattccaggagctccctgagccctgagaccatggtgaggggctgcgttgggccaggctgggtgtgcacctgtcagttacattttcctatgtgtcctccttcctttctttggagcctgaatctttgtctttagcatcctttgtagtcttgaattctgagcccattcctgagacccctctgaacctccagaggccccgcagctctcaagctggaggactggggactatgctcatctttcctttgaccccaggtctgtcttcctacatttctttaacgattatttctctgggccaggcgtcgtggctcatgcctgtaatcccggcactttgggaggctgaggcgggtggatcacctgaggtcaggagttcgagaccagtctgtccaatatggtgaaatcccgtctctactaaaaatacaaaaattagctgggtgtggtggcgcacgcctgtaatccaagctgctcgggagactgaggcaggagaatcgtttgaacctgggaggcggaggttgcagtgagctgagatcgtgccactgcactccagcctcggtgacagagcgagactcagtcctaaaaaaataaataaaaataaaaatagaaaagaattatttctctaccttttggaatgtgaaattgcctctgagacgaacctgtgatttgtcacctctgggagatgacaaggatgcctctgtgacctttgtccccatgctaaatattttgtcaccatgctggctttcttgtttgcatcagtaacagaccggccatttctcccatttggctgtacagtcgttagcagtggcccctccacacacacagacacacacggacacacacagacacacacatggacacacacggacacacacacacacgtcgcttctggtctgagaatgtctgcctcctttccattcccctgggcaggttattttcttctcctaatcacaaaacccatccttcatcttaataattctcctgagagcgatatttacaccctataattagaactttatgttcgttttattaattacctcttttttgcctattgatgtgaaagaatctggggctaaaagtattacagatggctctacacattgaaccgttgatatttaaactcaatcagcagatgctggtgctgtggggtggggtggggcagggtgggcgtcccaccggctcctcaggccttcctccacatcccatcggctccactcagggactccacttcttctcagcacctgtgccctccagtccctctcccaggaaggcagcaggagaggagacccccgtgccatcttcaataccacccctgtgactagggtgctgccccctcctcctttcttctccaacttctagatttggcccctaaatgtgactgaataacgtggcaagcccttcagacatgacaaccccatcgggtcagagaggtagtggttgcagctgggcctggcccaccatcggggtggggccagcaggagcaggagcacgctgtgtgctcgtggggaggaagggctgggtgaggctggagcgtgggtgggaggtgctggacagggatgctgagggcaacgggccctccctgcaccgaggcttcagcagccctgctctctgctgtcagcctcggatccgggctggcctggccttcatctctccccaggctccaaagaccccacatcgccatctcttgccgtgagacctccccacgctgaacgtgtgttcctctagccacttactcaacgtctccactgcaggccccagtgtaacttggccaagcagacatttcattttccccaccagagcagacccagcccagggctccctcctcaccttgggacctacagcaggtcctgccccagctccatgtgcgggtccctcatctgactcgcacactgcccctccgactggcccagggcctccactccagcgtgtgctcctcaggcccagtgttctgagcgtggagtgaactttctaagtcacaatttaagtcacatccctctccctctggaaatgtctgctggctttgcacccaccaaggacaagatccacagccttcaacacacggcatcacgaaccacctcccgagccggccccctccatccctcagagtcaccacaatcggcctaccccgtccctcagaggcaccacagccggccccctccatccctcagaggcaccacagccggccccctccatccctcagaggcaccacagccggccccctccatccctcagaggcaccacagccggccccctccatccctcagaggcaccacagccggcctcctttgtccctcagaggtaccacagccggcctcccccatacctcagaggcaccacaggcagcctcctctgtccctcagaggcaccacagccggcctcccccatcccttagaggtaccacaggcagcctcctccatccctgaggcaccacaggcggcctcctccatccctcagaggcaccacaggcggcctccccatccctcagaggtaccacagatgccctcctccatccctcagaggcaccacagccagcctgcgtggcctctgtgtttctccccggggtctttccaggctgggcttcttctcgtcctaacgctcagaggcctctgcttagccccaccttccatcactgtgccctcttctcctttcttcacatcacaccttactagaaattacccggtcactatagtgcctgtcccttctccgcgacaaggggacccctagcgtgcttccccgctgcgctcccagctcctacaacagtgtctggcccctcaaagcgactcaacgaccctctgctgatccaaagactcggcatccatgtgcctcccaggccgccgcactcctcctcctgggaacaccctcgtacggacgttctgtggaaatagatgttgtgttttcacctcttgtaccttgttcacttaaaatttaatcaacatcttattagagaaagaaagaggttctttgctttttttaacttttaaaatatgaatacctgccgggtgcggtggctcaggcctgtaatcccagcactttgggaggccgaggcgggcggatcacgaggtcaggagatcgagaccatcctggccaacacggtgaaaccccgtctctactaaaaatacaaaaaaccagccgggtgtggtggcgggcacctgtagtcccagctactcaggaggctgaggcaggagaatggcgtgaacccgggaggcggagcttgcagtgagccgagatcgcaccactgcactccagcctgggcaacagagagagactccgtttcaaaaaaaatatatatatacatatatatatatacacacacatatatatacacacatatacatatacacacacatatatatacacatatatatacacatatatacacatatatatacacatatatatacacacacacacacatatatatatgcacatatatatgaatacccaatacccaatccacagctttctctttgtggtgcttatgtggtgtcacaatgcgtcttgtgcctctcatctgattccgctacacggtgcaagttacgccagaccagaaactgaaccgacgctgaaagtatcaggccttccgcttagcgctgccttcgagatcagtctctcgacccctgttaggagcaacggcggtgaggcaggatgaacggcctcatccacggagcactgctttgccgtctccagaaagagctgtcgaggtttatttattcacggagaggctctgcatcacgagagtgctgcgttaacccaggtgcgggggatattatcctccccgtgagagcagctgcatggatttttttaatgtcaaattccatatgaaacagcacaaatccccatttctgccccactgggttgagaaatctgtgggtgatagagtataggtaaaaacatcttagcctgcatgaaaacaaacatcatcttagaagaaggaaagagcaaatgttttaaaggcctaaaaataataattttctctagggaaaaatttgatgggcacgctatgatttattgccaaatgatatttaagaaaaattcacaggagaggcggctgctgaatgcctccaccgagggttctgggaaggaaaacgcccgcttagtggaagaacagaacggccgcacagaaagtgcttggtccttggcttcctgtgtctcccccaaaacacacgtggcttatcagaaacctgcaggaaaacaacacagatttattctctcacaggaggccacggtccagatgggtttcactgagctgaagtcagggcttgggtgggccgcacgctctggggcggctcctgaccttttctggcttgtggcacctggctggacttctcggcgtgcagctccttcgtccaccgtgaaacccgccccggcgtccctctccgactccgcttccttcatgggacttcacttccgtgtgctaagaacgtgtagcgaggcccaccgtgttgacacttccctgagtgtgcagcgtggtactgttggctctcaaccgtacggcagatgtcgagaccgcgttgaggccgcgtcgctgaaaccttgtgcccttggaacggccccttcccgtgcttcccccagcgccagacccggcagcctccatcctcctctcttcttcggtgcgttcaattgtcatagattccacgcttcagcgacgtcgtgcagcctctgtcctgggcctggcttttgtttcacttcacgtcatgtcatgcaggtttatccctgttgttgcagatggcaggttgtccgtcttgtcttaaggctgaagagcacccactgggtctatgcaccacgctttcctgcccgctcgtccctgggggacatgtgcttccatgtcttggctcctgtgaacaatgccgtgatgaactccggagcgcacccgtcacttcgaggtcctgatttaacttcctttggataaatatctggaagtgggattgctgaatcatatggtggctctatttttaattttttgagaaaacttcatactgttttccataatggttgcaccatttatattcccaccaacagcatgtaagtgttcagagtctacacatcctcaccaacacacgtctttttggtcacagcctcctgatgggtacagagacgtatctcatcgtggctctgatttgcatgttcctgatcattagtgatgttgagcatctttccatgtacagtgtgttggccatttgtatgccttctttggagaaatgtctactaaagtcctttgcccatttttaaatcaggttatcattattatttgctattgaattgtaggaagtccctatacattttattttattattattactttttggagatggagtcttgctctgtcatccaggctggaatgcagtggcaccatctcggctcactgcaacctccacctcccagattcaagtgattctcctgcctcagcctcccaagtagctgggattacgggtgcccgccatcacacccagctaatttttgtatttttagtagagacagggttttgccatgttagccaggctggtctcgaactcctgaccttaagtgatccacccacctttgcctcccaaagtgctgggattataggtgtgagccaccacacccagccacctatacattttaaatattaactccttatccgttatgtggtatgcaaatatttcctccccggtgaccagtaggggatgcagagaccacacacccaccactcaccctacctttcgtgggctgccctctggatttgctgattgtttccctgctgatgcaggagctcactggtttgatgttgtcctgcatgttcacatttgcttctgttgcttgtgcctttggtgtcagatccaagaaacctttgcctagatgaatgtcatcatgcttcccccgtgttttcttctagtacgtttatggtttccagtcttatgtctcagtctttagcccatgttgagtgggtttttgtggatgtgaggtgagggtccgatgccgttcttttgcatgtggacatccagtttccccagcacctgtgaagaggcgacccttccctatggtgtattctcctcatgcttatgaaggagcacttggcagtgtatgagttgtttctggactctctgttccattgatctataagtctgtttttatgccagtagtgtattgttttaataaccatagctttgtaatatattttggaattgggaactgttgcatgattttttgtggagctctgggcaggtttttcatgatggcaaaatatgtcaacttttctttttggtgtaatttcttcattgctaacattttccctagacagtgaaataataaacattttctaaaagttcctcaagaaaaactattgaaattatttagtagaaacatatgcaagagtagataatattgatgtatccttattatatttagaagttaaaattaaagaggatcttatgggaaatttaaaaattgcacagtaagggattccttaagaaacaggcgcaagcccttatttcgtagcatctaattcctcaccgggtgtggaggggcctgtttacccaatgcccccgcgaagtcatagtttggtggcatacagctcttaagaatgcttattagctcttaatatcagagaggattaacctcctacttcatgaaacaatttgctaaggctgggaatttttcttccatgtctgtgaggactgccttcccttctttccacacacttcttcattcgttgtgtacctgctgagcactcatgatatgtcagaccaagttctagggactgcagtggtgaacaactccagtgtctgtgcacggagcttccattctgtaaccatgcagctgctccagagaatgccaaggtcccagccaaaaagctctagatgattctagactgtgcacggagcttccattctgtaactgcagctgctccagagaatgccaaggtcccagccaaatagctctagatgaggggtgacacataaggtgaggacccacgcgtgcacacacatacacacacttgcacacacatgcacacagtctcccctctgacccttctcgccctactgggtgaccagtaggtgatgcagagaccacccacccaccattcagcaagatctgacaccttctgactcttgacagatgatttctgcagacagatccgatgtcatcttcctcccagccccccttctcccagtcctgcctcttcccaccctgcaggtctaggcctcactcacgagagaaggctggttttatccactgtgtgtggagcctggcaacaagcatcccacattggtgtgatccaggttaccctctcgccatgcagtgccctcactgcccttgctgcccctgagctctcagagggatgcgctgcctcagcgtggggtgggagtgccgctctgcacactagactcagtcctctctctgcctggaaatacccacaaaggccacaggatacagataatagctgtactggtgctctcagacacattttccatgaaaagaagaaaatagcaaattccagtaagcattaaggaaactccttctctgggagtctctgttcctctcccccacagtgcttcttatactgtgcatttgaaaggtgttttaaaaggacttgttgtttctttaagaagcatagaaaaaatatatatactcctgtgtgtgtgtgtgtgtgtgtgtgtgtgcgtgtgcaaatacatcatcaactgaaggtctgaagaaaagggaaaagatcgcagctcatcaggaatgaaaggtggcttgttctccagcatcctagttaaaagttcaaagcacatttttcttataaattaggctggagtaaaattcagggagatgggaaaaggaagacataaatttttaaaacatgcgaagaatttaaatgagcaccaggggtgaaaattagacacatagaacatgtattcgacgtaaactcccggttgtttaaagtcattaacgttgtgtcgttatgtctagtgtcaggttatggctccacagcctgtttgccagttaagcggtgggggcagggcaggccttggtcaatatttgagtaaaagaagaatcttaataaacccaagaaagtaacttcaataataagaccaggcagtgttttgcaaagcagaacagaagcaattcaaaagggagagagacacagccagaggccccaggagcccccaccttggggacatggagtgtctgtgtgagcctggctttgttctgaggcaggagggacccgagtgcttggggccagccctgtcctgttctgcgttagcgatggggtctggtgcttctccacacacaccgtggctgtgtgtgcaccggctgggtgacggcccaggtggttttgtgccagctgctgatgctgagtgcacctgaaaggcccacttagcctctttgtgaagaggtgtgggaagatgtgcacacagtagagagcagactatcacaagccacaaaaatgtgtgtgtgtgtaatatatataaaggtcgaccattccttatctgaagtgattggaaccagaagtgtctcaaattttgcattttagaatatttacatcacacttactggttgagcatcccaaatacaaaaatctgaaatccaagatgctccaaatcagcattttcctttagggtcaggcctatgctcaaaaagttttcgatttgggggcattttgggttttagatctgggatgctcaacctgtaggtgcatgtatatatgtgtatatatgtatatctacatatgtattcatgcatgtgtacaaaaatatgcacatatgtacatacagatgtatctgtatatatgtatatgtgtgcatgtatgtgtgcatatgtgtctatagatgtctggtatatatgtatatgtgcaggtgtaaatgtgtgcaatagatgcatatacgtgtatatgtgtgtatgtatgtatacatagatgcatatgtgtgtatacatgtatatgcgtgtacatctgtgtgcccataaagatatatgcatgtgtatgtgcatacgcatgtatgtgtgtgtgtgtgtacatcttctgtctctgcattcttactggcaggattattgggaactattggatctttctgaggaggccaggatgatttccgtggcctgccagtttctcagagctatctgggttgaggcactgagaaccccctcagtccaggcagaccacggcccggtggtctgcatgaacaaagtgagtacttggagggccactggcatgggcccagcttcccgctctcctctgcatgcacagcctctatcccatcagacctgcacctcagcagcaccaagctcaggggctgccctgggctcccctctgagcatcagctcctctgttccagggagagcctctgctcccctcagggcccacctccttctagcagaaagctgattcttccccagactgggccctcagttctctgctaggtttggccaggctggtgtctttgacatgatcttctgggaggagaggcagaaatggggcccttccgatgtagctggcaaagctgtaggtgaacggtttgtaccaccagggaactgtgcccgagaacacatatgttcccacaacaatggggtttgtcagcttgcaggtgcccagccctttccgtgccctcttgagatgggttggggcagacagagtaggaatgcttcctggctgattacaaggaaatcccggcccattggatggggaagccacaagacggctgcttggagagatggtgctgcacacacatggcagccagaacgagtgtgggttcagagagcaggaatagcactccctgcccttgtcatgctgtggccaaggtttaggactccacagggcccagatgtctcctctggtcccaggaggatggagcctcagacctggggccatggggagggaagaggtgttccttgggacaagcaggagcccagtgggcagatgcctttctgcacagccaggggactgctcctatttctactgtttgcctggcccaattcatcacaggagggtgagggcagggctgcatgcctgagagctgacaaatccttcacatcctggagctttgtactgaacactgcagggttccatacagctgtcagctgcagagactaggcaccgcccctgcaaatgcctggcctcctgctgtccagctgccttcactctggcccggaagtggttctggggacagtggcttccttccagggcagaagctgagatccagtgtctgtggagcctctcatggcacgtcaggctctgggatggatgtttacgtgggttaccctaccaaatccctgagaactgctgctatgattcccactttacagatgagaaaactgaggcttagaacattaagcactgtgagctgagatcattggctagtgagcagcagagctgaggtccaactccaagtgtgtttgcccccaaactcacactctgtaaaagtccatgggcatcccagatctcccacccatgtcttcccactggaccaggcatccccagcctctgggccacggactgacaccagtctgtggcctgttaggaactggggtgcacagcaggaggtgagtggtgggtgagtgagctgttgagtggccggtgagtggtgggtgagtgagcaggtgagtggcaggtaggtgagtgggtgagtggcgggagagtgagctgttgagtggccggtgagtggtgggtgagtgagtacgtgagtggcaggtaagcgggtgagtggcgggtgagtgagcgagtgaaactttgtcggtatttatagccagtccccatggctcacagtactgcctgggctccacctcctgtcagctcagcagtggcatcagattctcataggagcttgagccctgttgtgaactgtgcatgtgagggatccaggttgcacgctccttatgaaaatctaatgcctgatgatctgtcactgtctcccatcacccccagatgggaccagccagttgcaggaaaacaagctcagggcacccactgattctacatgatggtgggttttataattatttaattatatattacaatgtaataataacacaaattaagtgcacagtaaatgtaatgcgtttgaatcatcctgaaaccttcccccaaccttggtccatggaaaaaccgtcttccatggaacaggtccctggtgccaaaaagagtatggaccgctgtcctggacaaaccctgggcctggaattgaccttgttgaaaacactcttttggattaagcatctataagattcagttgttgccttggacgattcacatttcacatggtcagtccctgcagcacctcccgaagtgtggtgtgtcacttgcttttatgtggaatgtgggcagttcttaaaactttattttaatgcacacgttcagtccctgcagcacctcccgaagtgtgctgtgtcacttgcttttatgtggaatgtgggcaatttttaaaactttattttaatgtgcacgagaaaaagcaaaatagtacatcaaaaacatgaattttgtgggtactgttgcttaggataagtaagaaggtttcgaaagctgagtcagtccaaagaggaacgtgttgcgacaagccagatgccttatggagccaggaggctgtgactctggccctggagggggctcagccctgagcgaggtgtggaaggagcccggcaccacccctgccgtgtgagctcccacgtaggcccagggttggatgagatgacaccgaggctgtggagccaggaggctgtgactctggccctggagggggctcagccctgagcgaggtgtggaaggagccccgcgccacccccgccgtgtgagctcccgcgtaggcccagggttggatgagatgacaccaaggcactgtggcgagcagaaccgtttccccaaaaagacacgttcaactcctaacaccagcacagtgaatgccgccttctggacatagggtctctgtggatggagttagtaaagatgaggcccttatccagtacggccggcatccttctaagaagagacagcacagacacgccccgaggacggagacggaacggagtgaggcgtctacctgccaaggagcccccggcattgccaggagccacagagagtcgcccgagagcttcctgagcacgtggccctgacaacacctggatctccagcttccggcccgcggtcccgtcagacaattcatttctgtggtttgaagccacccagtttgtggcactttgaccccaggatcctcacaggaaaccgtctcactggcccagtcctgctgggccctgcccatgggatggacttgctgtccttgaacaggaggcaggttcggggaacaggactgtaatgggtcatggaaaataccaggctgatggcagagggtgcgtggggaggagatcagggaaccgccaggccggagctggaagccggggccaccgtccaactcacgagggctcggcagagaggacaggggagcttcccctgctggctgaagtgggtggaggcgaacctggcccacaacaccctgagcttctgcggagccatgtgagggccacgtggagaacactgcagttccaccttcatcagataaagccaaccgttgttgtttaagcaaaggctgcggacagtgagcacagaacttcacaacacatcatggtcgcagcgcaccatcccccgtgatcccaaagcagcgatctagacgtgtggggtccacaggcgggcgccctggcactgggggctctgcaacttgacgaggctatgccaggctgggctagaggtgccgtgctgggcacaggctctccacgggatggcgggactgctgggcacaggctctccacggggacggcggggctgctgggcacaggctctccacggggacagcggggctgctgggcacagggtctccatggggacggcgggactgctgggagctgggttctccacggggacggggacggcgggactgctgggggctgggctctccatggggacagggacggggacggcgggactgctgggggctgggctctccatggggacggggacgggaacggcgggactgctgggggctgggctcttcacggggacggcgggacttctgggggctggctctccacggggacggcgggactgctggaggctggctctccacggggacggcgggactgctgggcacaggctctccacaaggacggcaggactgctgggcacaggctttccacggggacggcgggactgctggggtctgtgctcctcaccccagggctcacgcttttccatgagaccctccccagccacatcgggggctctgaagactgagcactgagggtcagcagcaggtaggagatgtctttgaagtttcatctgttatcttaaaaactcgtggatttttggggcggggcgctgtggctcatgcctgtaatcctagcactttgggaggccaaggcaggcggatcacgaagtcaggagatcgagaccatcctggctaacacagtgaaaccccatctctactaaaaacacaaaaaattagccgggcgtggtggcgggcacctgtagtcccagctactcgggaggctgaggcaggagaatggcatgaacccgggaggtggagcttgcagtgagcggagatcgcaccactataccccagcctggatgacagagcgagactccatctcaaaaaaaaaaacccaaaaaaataaaacaaaaaaaactcatggatttttgtaatctactctattatatatatatatatatatatatatatgcacacacatgtatgttttagtatcaaaatgacttcaccccaaatctccacgtgaagtagatgcgtctcctctccatcgtggctgttggcacagtgctgtgtacctgagtgtgttcaacgtcttgagatttctaagcttaagggcaggagatagcccagggctggcacccaaatcctaagaaccctggccaaatatacaggatttaatgtcctcagcaccaggcatcacacaggaacgtgcgtgagcccatgaaatacttgctcaataataaatgctgccaagctgctaagcttggggaacctgatgagcactcggcttatgggagactgatgctccccacaggccggcccctgtgccgagactccacgcagtggcttcctcgctgtgacagcctcccctcatctgacgaggtccaaacagcgggtccaattctacccacacctctttgcatagggtgcttctctggattttagggtctagaccaaagctgaggctgttttatacattttggggtccctggaactcaggacaaggccatctgtatccccaatgctgaatgagtctccgacaggtgatagggcgatggggtcgctgtctaagtagggaaggaccaccctcgacttaagacatggctcagtgaaaaaagcctcgctctgaggacaggcagtgagaaatgaggaggttcagggcaggcggactccatgtgactgagggtttggccgggctccccttatcaacccggcatccctcgaccatgttctctggtgcacacaggtgagcagagggcagtgtctgctctggccaaggcaggggcaccccaacatcgcagccccttttggatgtgaggtccgctcattagatccgaggggccgtcctcctcccgtgctgggacccttggggcttgccgggagagacgcccagagggaaggggctttgtgggaggaggggttccgctgcccttcctggggcacctgtttcgctttttgtctttctttcctccctttccactccactccctttggggcatgagggaggtgagggaggagggtgggaagaacaaaggagagaattctgaggagggcgtcctgagttccagggacttctttcatcaagaggaaaaagaaaaactctttcaacactccctgtgcatagggtgctaatgagctgcaaattgaaattatttggagtttttcttaatggtgaaaagaaagaagttgtcagaggagaccagaaactctatgtcagctgagaaagctgtaagcgagagagatgaatggacggctcatctgtgctttggtgcatctttcatcagccggtgtcacccttggtagccgggtgctggccaatttccatttaacttccatttaacgtatagccaaggaggcccgtgatttcacctgtctgacccaccacagatgggtagctgggcttcacagaaatggaggttgagttcccggagcggtagcccagggctggtatgttgagaattccgtttggaaaccagcgttgtgcaaaccggggttaggatgtggaaaactcgccctccttccaaacccagaagccttcgtcttggtttagaagtccctaagccaagtccctacccacattccacgctgctccctaatttcacccggaccacagcctctggatgagcttctgttaaaaagagatgactcggtgacaaacaggaggacggtgctcaaatgactgtgacacgtgccgtgtatctgcaaagacctgtgccgtgctaaaaccacacgcatggcagcctcccccaagccaaccacccgggcccacagacaagcatctccagagcgcgtgggaccgtagagaaggcagtgacagggccagggcaagccggttggagaagtggaacttcagtggtaagcccagacctttgggacccctcaccctgcccggtcctcctgctgtggggtgtgagtccagccagtgctgggaagccggtgtggctaggacaacaaagaccaaggacagcggggaacggtggggagggaagagggtgggagaccagagtcagaggcggacaggggttcgatacgccattcaggtccccaaaacagcatgtgcagctctcgttaaatggaaaaggccctaatgtcatgggaaagtctaacaatttgttaaactttgttagtgtacaaaatgtggtgatcctactcgtataaaaaagaaagttcaaatgcgcagaagaaagatcagaggacaagatgcccacgaatgataagcgcctttgctgcctctgggcgggtccgggggagtcgcatttcttcctcactgcatcgctgtattttccagatgtccactgaggaatgagcattgctttttaattagcagctgccccgagtgctccagctgccctgcgtgtggctgtctacacagcacgcattccttaccccggtggttttcatctggaccctgagtcagaatggcctggagcgcgggtaaaacagctcggggccagccagagcttctgagccagggctgggcccaagaacgtgcatttgcgttgttccccaggtgatgctgctggtgaccccggggaccccgccgtgagagccccgacacaagtcgcggtttgtggtgctttggaggagtttgctccttagagtgagggggattgttctgccccaatggcctcttcagagctgcgagactgtgcccacgcgaggcagtggtcgccacacccacactgccgtgctgcgcaggtgaggcctggtgcacggagcccctgggggacacggcgaagggccttctcctgccatctgctcaggaacccctccctgggcttggcctccatcttgacaggcaggcgaggaagcccctgctgacgccatttacaactgcaaacctcccatttcctcccaggtccttaaagctccacatcataaaacggatgtgcgcgtgaaggaaacgtgggtgtccacagagagctcccccggagaaggccacgtccacggtgccgcctgacagcaatggcttcctcagcgtttgacgggcagggagaagggtggggaggccacaaggacaggagaactggcgctcgacatggggcaggacgggagcaggatgggaacaggaggggacaggagggggcaggacagggacagaggagagacacggggcaggacggggcaggacggggacaggcgggggcaggacagagggaggacagggacggaggagagacggggggcaggagggggcaggagggggcagggagccacgtcttctccaatcccatatggggccatctgccaccctctgcccaaaatgtacgattcaccatggcaaggaggcgagaagcggggagatccctctaaacccaaatgaacacagagtgatggggccccagcaccccatccacaggctcattccattatttgaaaatgtttctaaaaactgagcttcttttcatctttgaattggcttcttgtcacagagcagctttgcaggcagcctgtttcaggtgtccacactttgcagagggcgcctctgcacagaagcgcacgagtcccagatggagggaagcaaatctcacccaactttaaatatttgtttctccaaagctacgtggtcacccgtgcatggtgacggtgatgtttgatttcaggtgactttgaggctgaccttccacacggggccctgcgtttctctcctctgcacctgaaccctcctagtctttattctgggagcagcgcgggaggcagtggagacgtggaagcaggctccggctgctgggcctgcatgaccggtttccctgcagaagattctgcgcccttcagcctcaccgtcctcacctggcctgggtgctgctgtgggcaggcgctgggcacgctgggaagagcagggccagccgtttgcaggacgggaggctgaggctgtgtgcacctcctgagggctgggccacaggtgggctcaggcctgcgccctcccatggccgtggcctcttcctcggtcctttgccctccagggtgccaggcctaggcctccgcgcatcagtgtggtcaaaaggcaggactggtgtgtggtgtttcctgacattttgttacctgtagagccacttagagaagcaccgctgccgaggtgggaaagccggagtcccagccagtgggctgagctcagggtgctggggtcctgggcccagactctgtgctgggaccttgtttggaaatagggtctttctagaggatcacatttagatgacgtcatgggagttggccctagtccagtgttgctggcatccttttaaagggacattcggatgcagacaggcactcatgggggtcgacgtgaaggagagagccacccacatccaaggactgttggaggccaccagaagctgtagagatcctgggacagaccacccttacagcctgccatgagctggggcgcgcgcacatgtgtgtaaagcagcacacatgcatgccacaaagcagaggctaagcagtgcacactgtgcacactctgcacacgctcaggcggtgacacgttgcagacatcgctgtgcttcagaaagagctgggcggcaagattcacacaagtaagcatgttgcagactccccagcacacgccctctctggcttgtgctcatatgaacatactgtcaccctcgtgcagatgtgaagatgtgctctcactcatgcacgtacagatcacgccctctcgctggtgtacatgtgaacacatgctcccctcatatatacaaatacactcactccttctccacccttgttcacagcagcagcctgagaagacacagaattccatgaattgcagcccagagaccccccagccctgccggctcgcctcctgcctcccgcctcctagcgtgctctgaggtggagaccagctgctgccccgtgcctgccccgcctccctgggccatgctgccttgcagactctgctgctcggtgtggtcgggggcctgggtcggccccagggtgaatgagtgatgggttccaccctaaactggctgtggagaccttccacacactttcctcccctccacgagctctagggcagggcaagcttggaagccaagggctggcagaggccgagccagcctggatctcagagtggccacacggagcagagccacactccacctcaggacgctgcactggatatgagtgagaaacaaactttcttgggttaagttgttaagatttcggggatgtgtttaaagtccctagtgttctttttactgtccactgcctgtctccaggaggggcccgggggcaggcactgaagcccccgcagtctacaggcctctggcactcagacaggagctctgctctcagaaaagcaggcaggctggcattcggcacatccttggaagcgggtggtgcgagactctgccctctaccctctgccctctgccctctgccctggcgttgagtgctttgctgggactgcggctccctggccccctctcttgccccacatgtggattcgcacagaccctgcagcatccccctccctttctcctcctcttttctctttactcaggaatatcccatcttagttacggggctgggcaccccaagacctctctctaacaggggtccccacatccagggcactgcagatgggctgccgaccacatgcctctggcctccggccagtctcgggccatttgctgacaccccggaggccgatgggccctctcgctgctcaaggtggagggaggctgtgcaccgggggtgtcggcatgggagcgctgtgttccgggggcgccgcgggtccctcctccccaggctgcttacgcgtcacaccagcagctctgatttaaacccaaatcctttcacataaaacccttcacttgtgctcttaggagagggttttgcacacgtctggctctgcttcccttctgctgcattttgctggtgcgctgggggtctgtgtgtcttattcggagaagacgttgctgctcccccaaacgaagaatcatgtcacaggaaaccatgacaaaccccccttttgactgtgcctcccagcaggagaacagggagctgagaagacaatgaggagcaggctgtggggaaaggagaggtcactgaggtcacatgagtatcaggcagatggtgccactgccggagccaccccagagccaccatcacggcaccgtttcatcccatccagtcctccccacgtcctcaggtggccaaagaccacattacaccacatctgtcctcagggaaaagaggagagaatgcatctgagaggacctgtcgaccagggacacacccgacctgcacaaagcagcatctggagctacggccggggccatcaatggggtgagggggccaaggagagccctggctgccctgcagagggtgtgtccgtgtggcctgtgtgcatgcacgtgtgtgtctatgtgtaatgtgtgagagacgtgtgtgatgtgtgcatgtgtacatgtctgtgtatgtgtgcatgtttggtgtgtgtgtgtagcgtatgtgtgtggtgcgtgtgtgtggtgagtgcacatgatgtttgtgtggtgtgtgtagtgagatgtgtgtatgtatcatgtgtgatgtgtatgtatggtgtatatgtgtgttatgtgcatggtgtgtgcctgtttgtacatgtgtgatatatgtgttgtgcgtggggcatgtgtgcggtgtgtgtatatatgtatatgtttgtgtctgtggatgtgtggcatgtgtggtgtgtgtggtgtgtgcatatgtggtatgtgtgttgtgtgtacagtgtgggtgtgtgtagtgtgtgtatatgtgtatgtgcatgtgtggtgtgtgtggtaggtgtgtggtgtgtgtgcattcatgtgaaagtgtgtgcacatgtgtgtttgcatgcatgtgtatgtgtgtgcccgtgcatgtgtggtgtatggtatgtgtgtggtagatgccggcagtgtgttggtcatagggagggaaggtggaggctgcggtctagcagcagagaaacagatgggtggttttttctaaagcgtgggaaatgacacgggggctgtgtggcctcagagatgggtggggtcattggggagctggatcaataatctggacatttgggaagatgtcttgggggccaggtgcccaagctacatcttcaacgatgaggaagacaggaaacggggagggacgtctcaagagagggcgtggcctgagccaaggagttcaggtggcagcttccagaagggcagaggccacgacaccgaggcccccagctggtgcctcctgtggctgagtgatgaggggcactggagtccaaggccctgggtgtgagtccctgggatgctaaaatttaatttcctcatgtgccaaatgaagacaatatagtatttacccctcaggcaattattaggaagattaaatgttaattttagagaaaatgtaaaacataaatgcttttgtgattaattaattcattaattacgtgtggagaacctcctgggtgccaggcacatggcactccagccacaaacaggagaagctggcccgccctcctccagcagccctcgcccaacacacccctcctctgaaaccagcaaggccaggcccaggcacccgtgacaactgcaccccgagccacctctcaggacaggccaggcccaggcacccatgaaatctgcaccctgagcctcctctcaggacagaggccatcagcccacgtgcctgtgggattcttcatttctgccactaagctgccctgtggacaccactggccccagccccccaaacacctgctgggcctgggtccacagtggcccacctgcacccgctcagggtggcctgggcagcccccttcggaagcccagggctctgctgcctgggagctccagcacccagggacgcgctcatttggcgctgggtcttccaaagtgagccctcacccccatgcctcatcagcatggccctgacagggacaggagtgtggtagaggacttgggttaataagtgagatttttaacaggctccgctcagctggctctgtcggctcgagtctgagcccatccgtcagcgtcaattaggaagcctcagctcagaacgcaacaccaggggctgcgcagaggaagaagcgcgagggcgccctgcaggctcacagcgcctgagcacacaccgagcggccgcagcacagccctccctcccgccccaagcacacaccgagcggccacggcacagccctccccgccccaagcacacaccgagtggccgcagcacagccctcccgccacaagggtacaccaagcggccacggcacagccctccccacccctacctccttttggcagcgcaggtgcattcaggggagcgtgctggatgggagggggctccctgtcacgtctcctggaaggatgggatccctctgcacgccccatcacccgcccacccactgccagccatgggcacacacacaatatttgtgtattcatgaacacgcaaaacacactcacacatgcgatcacactgcatgaccccccccacacccacacatgcagtcacacacacgcacacaacagacacatgcttatgtgcacacacacaacacacctgcactagcccaggcactcacacatacatgaacacagcagacccaaacacgttcacacgcacaacacacccacacacacagaggcactccacacacacatgcacacacacacccacagtcacacatgcaccaccacacacatacagcagatccacaatgtatatgcacacacacaacacatccacactcacacatgcactccacatacatgcacacagcagacccccacacacgcacacacatatagaacacccacacttatgcactcacatatatatgaacacagcagacccacacagtcacacaccaacacattcacacatgcaatccacacatgcagcagacacacacacgtgcacacaccacacccatgtcacacacagcagacccacacacgttcacacacacaacacagtcacatatgcactcaaacatacatgcacacagcagacccatatatatgcatattcaaacacacaacacatccacactcacacatgcactccacacacctgcacacagcagatccccacacacatgcacacaaacacccacactcatacacgcactcacagcagatccaacacacgcattcttacacatgcacacagcagacccacacacgtgcacacacacgcacacacactcatacatgcactcacagcagactcccccacacacgcattcttacacatgcacacagcagacccctacacacgtgcacacacacatgcacacacacatacacacaccttcacctgaggccaagccaagggggagtgatctgggaagtggcatctggaggctgaggaacctcagagcatttcttcttttgcatctgaggtttcaaaacccatgagaatgatcttggagttattccttattctctacatgccaggaaaggtgaaatcagaaaggagaggatttgacagcctcacccagagggaaagtgtcaggctggggctcactttttgccctttggagccgaggatgaaggaaacagtaactgccacagggcagcaggagtgcaccccgcagcctggtggagtctcccacgctggaggggaggcaagagtgcaccctgcagcctggtggagtctcccatgctggaggagaggaggatgaggccaggcatactggacagcttgtgtgaccccaaggcaggcatggcaggatctaggtgcagatgacacacccagcatccttgtgccaatgccactcgggtgtactttgctgcctctgctgaatgtaggtggaagaaggcaactcacctgtgaacagtgctgtcctctctcctgagaaccagcacaatcataagtttggagacaacaacaagaattcagttttagttatgagaggcctataagacctctgagtaaagacataactctaggatctggtcagagctataaattcagggtcaattcactccatggctgccatttggagttatacagatgaatgaggtcatggagggaggtggtgtctggagagaagtgtcctgaggaacccagcatttggagagcatgtggggaggccaccattgatgagcctgagaaagagcagccagagacatcggagatgaaggtgagcccagcatggttgacaccaagacaagaggaagttttgagaaggggcttattagctctcaaaagctgatggagagcccacagttgatgaggattgaagagtggccattggcttcagcaccatgaaatcacagctggccttggttggcatggtgggatagaagccactctgaatgagctggagtctgcacctgtggccggggcagaggcagtggctgaggtagatggaggattggggagaatgcaaacaggaagacaaataaaccagaggccagggaaaccaatggttgttgatgtcacagagaatgatgacataggttgtggtgaagataattgtgagagacgtgactaagggggaggagggacatgggttaggaagccattcatccatccaggcactcattcatccatctatatatacactatccatcatccatacacccactcatccacccatccatccatctgtacactatccatcatccatccatctactcatctatccatccctccctctatctatacaccatccaataaccatccattcactcatccatccatctatatactatccatcaatcacccatacactcatccatccactcatccactatccattgtgcattcatctacccactcatccattcatccatctatacactatccatcatccatccaaatactcatccatccatctatatacgatccattatccatctatacactcatccatccatccactcacccactatccatcatccatccataatacactcatgcatccatccacccatctgctatccatgagccatcctcccactcatccatccatccatccgtccatccatctatacactatccatccacctactcatctatccatctatatactatccattaactatccatccactcatctatccatctatatactatccatcatccatctatccactcatccacccatctatatgctatccatcatccatccacctatatattagccattatctatccataatacacttatccatccatccaatcatccgctatccattatctttccataatacacttatccattcatccaatcatccactatccatcatccatctaccctttcatccatccattcatctacccatccactcaccatgcatccatctacacactatccattatctatccatccactcttctatccacccatccactatccatctacccatccacatatcccatcatccatgcgtacatgcatccatccttcctcctatatatccatcagcccatccatccatccatccttatatccatccactatccatctatccatccacccatcatccatgcaggcatccatccttcctctcatccatcagccaatctgtcatccatccatccactcatccatccatttatctatatactatccatcacttatccatgtattcatccactatcaagcattcatccatccacccatgatccatacagacatacatgcacccatccatctttctatccttccatccttctatccactcatccattcacccactatccatcatccatccatgcatgcatccatctatccttccttccatccattctgtccatctacctatggaagcatatatccatccatccatccatccagatttctattgaggacccatattgttaaaaaatagagctaataatcacctaaaatatttaataaaaccttaaaacacataaatacctaaaatactaaagcctggcaaaataacaaattattagaataagttcaagaaattctaattaatgtttgcaagattatgttatcattagcttcaagacactcctagcctcaggctcagggtataggcaaaaaattaacacctagtacttgacaatgagcgtccgtacctgggctgtgattatgagcagctgcttctgattacaatcagtgaatcactaatctgcagtctgctacaaaacagctggactccatctattattcattcttgatgtggagatatccagaatggagagactagaattggactcctaggatccctgttgtcttcatcccccaaggatgttctggtttggaagttgtgtttctgaggcccctgacatccaagactacaggttagatcatcaagttcatatgacaggcaaggactggtgaagttttcagattttctcactcattggctagcattcctttgaactcttcaaaggcttgatatatatagtctaccttaaacatctggggatttgatgtcctgagacttaggttttgatcacatcaagcttttccctaagcatgaaaattttgctcaaataattcagataccctaaccagcctgtgtctctaaggggaatctggagggcaaagtggggaggaggttgaatcagtccttcgttccacagctgggtatgagacagacagagaaattagaagtgttttttcctttttcctccttactctagagatgagcagatggactggctcaaaagtggcctggacttcaagccctcatagagaactgatgcatctcaagtcaccttcgctctgccatcagtaacaatccccctgaacccagcgagagcacacggccccagagctcagaccgtcagtggggtttgtgcacagcctcctgtgaccctcctgaaggtaggagctgaccacaagtcctcctcccaaggcaggggcgagctcagcttgccgacggctgccagagagtcaccctcctgaaggtagaagctgaccacaggtcctcctcctagggcagggggcgagcttgttgtgccgaccgctgccagagaaccacaagagggccttcccctttgcacctgaagccttaattagcaggtttgtcttgggatgttaaggatgggaggcctctgtctggtgccccacctgtccaatgggcagcagcttcccgaggacaagtgcatgctgtccgtggattctctgtgcctgcatggcgtgaggtgtgtcactgacactcagggactctttgctgactcaaggctgccacacaggcccccggaagaactcggtaggaactctggactgttggcaactgagcctcccgcaaaatagggaatggaggctgccccattccggagggacatggtgagacctggctcgacaggaagttctagaggacaggcatgcttttgggtcactggctgtctgttggtgggcagaagagtctttgggtgtgaacctggatgctacactgcagtgacccccaactagtgctgtgccccaaatacttgggcagaaggcaacactcctcagagaaagggtgacctgtttcccgtgaggcagaacccgcctcgccttggctggagcagatgatggaaccacttccacatgctgaatgaagccacaaagcaggcggatcacgagcggcacccagggcccacattagggctgagtcatgctgggaaaactgagggcctggggagtcagccaatgtggccccaaggaccctgcagaccccaccccatctcaaggcagcttggctcagggcaaacgaggattcttcaccatcccaggcctgctggtcttcctctgcttccttggagcctctggtctgtagctggacacgtggatgaagtttctctttcccagcctttcttgaagctggacatgcgactcggttctggccaaggcaacccaagtgagagttgtgtgctgctttcagggagtgtctcatggtgggacgcgcgccctgctcctcttcttcccccttcctgctggctgaaatgagacctggatggtgggatctccagcagccatctgggatcatgaggagcagctcagggctgagggctggagcggcaggagtagaacaccttgtttctgggacctcagaggctgcaaggtcctcagactgcctcccccccagacttcttccacaggaaatgaaagtgcatttccagctcatttaagccacttttattttttattttctgtcacactcagtcacactaatcctgactaatacacacgtgtttgccagtgaacagattatcctctcaaaagtgtcaaaatgccacgtcagtgtatgaatcacacctttgaacaatgaaggctcccgtgttaagaggacgagtgagctctgctgcctggaccactgccctccacatttgttcatgtctgagttcacacctggggctcacacaggtatctctctcgaggcagacctcaggcgccttctctgcagatctgagaaaacctggctggatcccgggggagcagcagcgctggccccagccccattcagcttccaccactcagcttctctgccgagctcccaggcactgttctggagacctcaaggctccaggagacaaaaagtagcatcactgtagagagcttctggatgtctgtggcttaggggtgcttgaaaagttacagatgctcttttgtacactgagtcaaggctttggagaagcgcaagtgctttattcaccactttcactttgttcccccgtgcatgtaaggggtcaggcaatcccctctgctcaagccaccaccagtaaatagaacggcagcacaaccgtgatcaccacagtcatcacaatgagcgccatttccacgcgtgctgtgctgagatgacaacacaactgtgatgaccacaatcatcacaacgagcgccatttccacgcgtgctgtgcaaagacagcagcacgaacacgatcgtcacaatcgcgagcgccatttccacgcgtgctgtgcaaagacggcagcacgaacacgatcgtcacaatcgcgagcgccatttccacgcgtgctgtgcaaagacggcagcacgaacacgatcgtcacaatcgcgagcgccatttccacgcgtgctgtgcaaagacggcagcacgaacacgatcgtcacaatcgcgagcgccatttccacgcgtgctgtgcaaagacggcagcacgaacacgatcgtcacaatcgcgagcgccatttccacgcgtgctgtgcaaagacggcagcacgaacacgatcgtcacaatcgcgagcgccatttccacgcgtgctgtgcaaagatggcagcacgaacacgatcgtcacaatcgtgagcgccatttccacgcgtgctgtgctaagctgtatttcaccctcacgccaggcaacaaggtgggcattactcttcccagttcacaggtgagggccctggtaatctcagcggagcctggcggggacttgggggtgtcacaggagcaagtgggagtcctgattgcagagggtggggaccatggcatcccagagggtgggcagaacatggctttaggatgtcaccgtcctcctgtgaggtcatggggcaatggggagccaggaaaggcgcccatatatcctgcgcacggggcagcgaattcatctgcccaggagcacgacttatcccacaggcaccagaggggtctatactgacccggctcctgcacaggaccctccaaatgtcttcaagttgtcctgcatctccgaccgtgtccccagcagacacattgcactagagatgatgcttccttggtcaaaacactaggttctctggtcctaacacaacactgccagacatctgaagttactatattttctaaccaagcagactggctatgagtttttctaactgaatgtcatccaaaacctaaccctaactcctgtataaacattgttttcaaactcatgaagcatcaaaggcccttgtggttttctggagtttccattctctagagcttttcgacaacaccctgcatttgggttttcatcttgagccctcatattatctcattcgattcctgcagcggttttgagaggtgggcacccatttatggatgaaggaagccagagaccacaacacaacacaacacaacacaacacaacacaacacaacacaacacagtgtgggccgtggctgtctggaggccaagctcgatcagaatgtccctgggcactgtctgggggcctgagaaagcgttcgggctgtgtgggtggtgggggttggacctaagacctccagtgaggcgtgacgtcctccattcaattcacttatttcccccatgggggctgagttgtccttcaaacccagtggcccagggagtgggcactgcgtccacaaaggacccctccggcatttgggggaacccagtgtgctctgcagatgttccttgagcgaggactgaggaccaggtgctggggtgccttggaggagggcggttggtggtgtctccactacgactcaccgtgccggggtggatgtggcccctgagctgccggccccgccctcgccggctgtgatgctttgactcagggacggccaccgtgtcacgggctgttcccagagtctcagtgccttcctcgggctgcacgttctgattttgtttttttttgaaaaggtaaacataaagaaaatgcttgaagccccaggacacagttgggctgacaggtctccgcaaggcagctgccctggagggtccctcagacggcagcttggggtgcagctctgggcgtccccaccgtgggacctgcctgccttcacggccacggaagtacatttcgtaagttctggttttcctccttcctgacattaattttccccacatgcagatggagctgggaccagcctctgggttaaaattcagcatcacgtcttactcagaggaagatggtgggaggtcctcatgcttctctgagccccttccacgcgtgtggtcaccacagtctcccttttccaacctgtccggatgcccctgctgtaggctgtagacagactgtccaccttgctacagactgtagatgctgagctgtgtcttcacgagcaaccacagaagaggccacgttgactacagagcccatggacggaacagcgatcggatacaagacttgcccccacttccgcaagccctcggcacccacagctgtgcccctcgggaccacttccctgccccagagccatccgtgtcatcagcaccaagactatatggtgaaggaagagtctggaaagtggcagcagctcacagcaagaccctgagagacgtcctggttactgcaggtatgatcacagcaagaccctgagagatgtcctggttactgcaggtatgatcacagcaagaccctgagagatgtcctggttactgcaggtacaaacagtcaaatcaagtatctgtttatgagacattcaacaaaaccaggtaaactgaaatctatggcaaagtaccaacttcctgccaaacagctgacaagtaagacagggtctgtctgtgttgccgactcccgaaaatgcccactttggctaaaaaggtccagtagtggagaattttaacaacgccactcagttttatttgcgtaaccccctataaaagtgacctccaagggcaagccgtttggagtcaccaattcaggaacgaagatggtgtcactgttttctccaactgtatttctttatgcatcatggtttttataattttctaagggaaattgatgacatccccatcttaaaaccaaacacaatttgaatttcaaatgcacttggagttcttccttccaggacacgtctgcgatgccagcgcggggcgcagccgggcgcgggatgctcgtgagccgtgagctttgattctgaaatatgtaatacatttttaataaggacaactaaatttgtttccctagaaatgtattttgaagagtccataataaactgtcttctacaatgaggagctatttaaagtcaaaaacaaaaaggcaagggtcccgtcttgctgcgagtgttggggcaggtgctatctgaacacggtggcgcaaaagagatgaggcctcgccactgatcaaacactcggctggtaagtagaagtccttaaaaaagacgaacatcaaacaggtcctcatctggggcgctctttttgtggggtcaccctgaccgtgaggccacagatgcgggcccgtgtgcaccgcaggccatacgtggggttaggtaagtttgaaagtctggacaaggctgtcattaaagcgtaggtgatgctaaacggcgtgaaagcctctgctttctagaggctccagcaagactgacacggaaaagctgaggacgaggatgttggtgaagactccttacaaaggcggaaggcgccacactgtgagctgagccatctctgcaatggaaggacagagcatgaccgtgcacccacctgctgagagcccaagtggctgccccagcaccaccccgtccagagggccgggagagcagccgcattgaaggtcgctccaggaaaagccctggcccgactcctcaggcatgatggtacagatgttgacttggcggcaacacgtttgtccctgggcaaactctgtttcaccctgaatctcatgatggtgatgtctcctctgccccatggcagctgcctgccctgcacctctgcagtggcagctccacctgtctgtgggccgtgcttctagctgcactgtccctccatgcttccaaagacattgtgtcctggtcaccagaactcctggtctgcagtatcctctctcccccgtgttaccaccccctcctgccccaccctccctcccactgtcctttctggatggtgtccttgacctcctgtcttcctgctcttggtcccatgggaagtgccaaccctggaagaaaggaggggctggcttctctgtgcctgctcactggcagctgagcacccccaggggcatctggggtccctgaattcacagtcctcatcctcagactcaggggcatccagcccacccttcttccctactcagcccttaaaaagaggcacatggtaaaaggctgctggtaacaagatacccctaagttctcaaggtatcatcctgcaaatcaacgatgaattaccaagggaagaatttacctttacaatggagtgatgtggcaggtgcctcttttaccaaagcgactgcacttggcattgtcccagcagggaggggctggccgtgcacccgctgtggctggaggcacacacatcaccacgcggggaggggttgaccgtgcacctgctgtggccggaggcacacacatcgccacgcggggaggggctgaccgtgcacccacagctgccggaggcacacacatcaccacatgctgaagacctgcatctgaatctagtagtgtggggcaatccaacaggcccaggccacaggatatcccacaggacaagcctggtttctctaacaattgcaatgctagaaaagaccaaaactaaaacgtaaaggtagaagtattctagaacaaagaaaatccgagatgtcacaacaaaacacagcattcacccttgattggaatctggattaaaaataaaaagcaagctattgggacaacgggaaaactggccacatacgaacgtgtgctaagtaacgtcactgcttccaggctgcacgctgggggatgatgcagacactcccttttctgcacctcacggggaagttttgtgatgtctgcagcaacctttgtgacttccatccagacacacaggtaaatgacagagttgcaggcatgactgagagctcaaagttggtgactctggaggaagagggtgcaggtgctcattttactcttctttcaacttgtttgacagtgtggagtttgcaaaataaaattctgggataaagggagaagcacaggaagagggactccttgctgtgagcccagctgtggggaggaactgctcgggccctgcagcatcttacaaggggtgcagggaagtccagagacagaagcccccatggtgcaggcctgtcccagcgacctgtagcctcatccagcactgcggccactcctcctccaggtgtcccgccatgtgcagccgtgaatatcctgtagtctaagccttctctcgttggggttttctgttatttcttcccgaagcatcttaactgatgcgggttctgtgtccagggaagagcagggcagggctgggtgcatttggagttgccctggggctggggctgggagacggagctgccctccccatccctgtccacggcccctctcaccctgcagtactgagcagggtgaggcagggaagaggaggagcagaggagtggctgggagggtctcagtgagcatttcagagccatctccacctgtcagaacgagcaggaagacatccaacccttattgggagtctacacaggtgttctgcactgagctcccctctacttcgggcctgcgagaagcagggaaggtataggctgccgtctccctcccccaggcagctggggctgtcctcacaccagcacagcccagtcctatgacaagcctggccacgttagaccctcacgagacgtcccacgaatggaaccctaggccataaaatatatggatattccagggtttaattcatagccatccttaagctgggggagggcagttatggagctccagagcggggtaagttgttggaaaacggaaagaagtttgtctggcagttgcttcgtctgcatgaggagtgacggctgggctgctgatggccctgaggggtcctcccggagcacctggcacctccgctaattctccggggtggaggcacttgcacaaccatgtgatgaattcttcagcagcgcccggaagctcggaggacatgagaggtggcaccaaggctgtggcagctgctcagccggtctcacaggctcaggactcgagctctgtgttaagccgcactaccactgtgattggcaccaggctcgatgctgcatctcaggctctgtttcataaacaggaggattatttcagaccgatcagaggcggctgcattctgcaaattaccgtgtgctgtggctgcgctcacacattgccaagtggctcctccgacaggcggcactaatccatgttggtctgttcaggaaggttgcctttgtaaactggagacagaatacttttgtttttgttttaaacatacatttgggaaggtggaagtcaagaaatgtagcggttctgttgagttcaaagagaaacacaggattcctaagtttcacccacgctttgcctgactgaccaacacactgaagctcccttcaaacccagagacttactgcacttgcttctagatgccacaaaaattgctgttaaaaagaaaaaaagaaatggaaacacgaaggagctgcacgtgtgggggaggtgagggtgagaaggaaggaaaggcacaatctgtcacagtttccaaacacatatgcttcgcgtgggaatctggggttgattcaaaggctgaatggatcttcagttactggaaggcttggcccaaaatatttcagtatatggagcagttctcttccttctagtagcaaaagcaacagcagagagtgactggatttgtgatcagaatggggacagtgggaaaagttaccaaaccaatttactcaatggagaaaatagccaactggtcaaagaactgtgatgagatggcgggattctccaggaggtgcgtgatgtggctggtgcccatccatcctgtatgatgataaactcgtccaggagcgagatgtggccggtgcccatccatcctgtatgatggtaaactcgtccaggaagtgtgtgatgtggccggtgcccatccatcctgtatgacggtgaacttgtccaggagcgagatgtggctggtgcccatccatcccatatgatcgtaaactcgttcaggaagtatgcgacgtggccagcgcccatccatcctgtatgatggtgaacttatccaggagcgagatgtggccggtgcccatctatcccatatgattgtaaactcgtccaggaagtgtgtgatgtggccggtgcccatccatcctgtatgacggtgaactcgtccaggagcgagatgtggctggtgcccatccatcccatatgatggtaaactcgtccaggaagtgtgtgacgtggggggcgcccatccatcctgtatgatggtgaacttgtccaggagcgagatgtggccggtgcccatccatcccatatgatggtaaactcgtccaggaagtatgcgacgtggccggcgcccatccatcctgtatgacggtgaatttgtccaggagcgagatgtggccggtgcccatctatcccatatgattgtaaactcgttcaggaagtgtgtgacgtggccggagcccatccatcctgtatgatggtaaacttgatggagcatagttccgggagcagctctcctgggttttaggaaattggggagggtgtggagatgcagccgttagtatgatgatcttatccgctgcttcaatttccttccagataaatttcaatattttgcatttcttctggtcacaactctcatccatggacattttaggagtaacaagccgctcatttccataaatcagcattgtggctttctgagtcgaatcggacaggacgtgggcagctggcgctgttggtctccactcctcactgggctgaggcgcactgaacccagaaaccaacactgcagccccagattctctctgacctggtgccgaaagaaggagctggcggatttctcctctgccaacgtccttcgaaactctctgtagtactttctatccgccaatcaatgagccagcagcattccctgtgatcaatccatcaattccacccaccaatcagtgagccagcagcactccctgtgatcaatccatcaattccacccaccaatcagtgagccagcagcactccctgtgatcaatccatcaattccacccaccaatcagtgagccagcagcactccctgagatcaatccatcaattccacccaccaatcagtgagccagcagcactccctgtgatcaatccatcaattccacccaccagtgagccagcagcactccctgtgatcaatccatcaattccacccaccaatcagtgagccagcagcactccctgtgatcaatccatcaattccacccaccaatcagtgagccagcagcactccctgtgatcaatccatcaattccacccaccaatcagtgagccagcagcactccctgtgatcaatccatcaattccacccaccaatcagtgagccagaagcactccctgtgatcaatccatcaattgatcagtcgacccacccgctggctaccaggggcacccagcgcagctgcgctcacagggaagtcagggcgagcgggcggctccagacagaaacgtgggtgtgcttgtgtgtgcagagtgcacgctcgcagaggggaagccacggggctgcgggcccagcctccagtgagcctggagccggcctgcagggaggaccccaggcgggtgtggggacccaccttaggaggacagacgcacatgaggctacggggcttgttgtcatgaaccccaaatgtgttgtcaataagagcaccggacccagctttcaatgcttctcttagcaaaaccagggattttcctgcagctgtgaacattgacctgtccgcctactccccgagccacagatctggggaaagaatgcatgtagcctgctgtgggtggtgaatggagctggggcagtgatgagctacttcttgccttttgtcaggaaaagaagctggatagatttctcttctcttcctttgagaatgagtgaagagggaagataaaagccagcaaccagggacagctgaaaatatggtttcagtaagagacaggccacagcgtcctgagccccctaggacaagcagaccttccaggaggatttcctaaggtggctggaagagaactctgctaccctttccaacgaagatgcaagacacacagcctctctaaaaacaggagcagaaacacacaacacaacgggaaaaacagggtgtcataaaaacagaaccgttaccaagttatgaaggcaaagagctggaactgggagagatgagaaataactgtgaggaaattaaaactacaatagcagagttaaaattcacattgaggcggcagagcagaactgactacagttcacaaccgaacccgcaaagctcttcgagaatcacgagcaaagcacaaaagatgctaaaagaggggatattagagacgtacggcacaggaaagagactcgtcctaaggatgggggagagtttgcaagaagaagctagaatgactagtaggaagaacaggaaacagggatctgcagcaatgcctcggctctcagggcgctcgggagggtgcaggggcgaaattaacaacatagccgaagggtgcactgcaaatgcgtgggaaacaatggcttattcaagaaactagagtttacttgggggaaggtcctagtttatccctcacttcacacacattacaaccaccagaaatgatccagatacattaacacattaatggaaccataaaaataacaaataaaaacttgtgtttcactgatgacaggatgagcaagcactttctaaacatgagagcgattgacaaaatcttaaaggaaacgactgtgcatttgaatccaccagagctcagcctttctgaacttcagacagtacaacaagcaacgttagacacagacaagcctggcagaacattggccaaaagtaagaggcaaaaacaaatatgaagagtactcgtgagtctatttcagaaaattcacactcccataggaaaattcatgaagagattatcccaggaagcagaaccatcaataatcaagtatgataaaatgtttaaatctacaataaatcaaaaactataaattaaaccaatgataagatgctatcgtttgccctaaataattgcatgcacttaaatgaagtcctaacccttggtgttaagtgagtggatgatggcaggtttattggacttgccagatgcacctgcatttgttggagatattagttcaactggataagaggaattgaggtatttagaagagcttgcaccatttcacatagtagttagatttctaggagtgtatcctaaagaaacagtaagccacatagattgaatgtatgcccaaggatattaattgcagcaagacttatgataatgaaatactagaaacaagctaaatgttcaacaatagcacatgggttgaagaacttacagcagaaccacataaagaccaaagtgttcctcagaagcatattttaaagacaatttgataaggcacacatacaaactgaaaagcaaaataaagacacacacacacacacacacatcctaaaagaatatcaaatagtaagcattttctaagttttccacgctaagtgttcaatagacacaaaacaagtattttaacaaaaatatgatttcctgacagataatatagaagaggtttggcctatgtcatgaccatgtcctggcctggaccatttttaattgctccagagacttccaaattgtgtcaccaaatctacaactgtgtgtccattcatccatccatccatccatccatcccccgaccaaaccacccacttactcatccatctacccacccaccctgcactcaccaccacctatccactcaccaccacctgtccactcaccaccacctgtccacacgtctgcccttccatgcatccctccatccacccacccatccacccaccaccacctgtccacccacccacccatccacacatctgcccttccatgtgtccctccatccacccacccatccacccacctatccactcaccaccacctgtccacctgcccacccatccacacatccgcccttccgtgtgtccctccatccacccacccatccacccacccatccactcactaccacctgtccacctgcccacccatccacacatccacccttccatgtgtccctccacccatccacccacccatccactcaccaccacctgtccacccacctgcccatcgacacgtccctccatctacccacccacccagagaattgctcgcttgttgtgtgctgtgggccaggctctgaggtttatggacggctaggacattattaatgcccatgggggatgtagtgtctgatggaagaggtggtggaggggggaggctgttttgatgcagagtcatccgagatggctcagaaggggcaccatgaggagccagggccatgtaccacattctgtggaggtcgactccccagcacacgcacccaggaacaccctgggcttgacagcctctgctgggtcatgccctcttgctctgtgcctgagtccttcgcactcctgccgtctgcaaggacacggtgcatccagcccccgcagggcagggctcacatcctccatgaccctcacaaggacacagtgtatccagcctccacagggcaggactcacatcctccttcactccatgacccttccttgttgccgccacacgtctgttgcacctgttagacacggagccttggactcaggggtgggtcccgtggatctcacagccctgctgcccagcataggacacacaagtgactcagtggagtccgacacttgctgagtggatggcaagggagaaagctcctctccaccgtggctactccagttcctctcacagtggatggcacgggagaaagctcctctccactatgcctactccagttcctctcgtagtggatggcacgggagaaagctcctctccgccgtgcctactccagttcctctcatagtggatggtacgggagaaagctcctctccactatgcctactccagttcctctcatagtggatggcacgggagaaagctcctctccactatgcctactccagttcctctcatagtggatggtacgggagaaagctcctctccactatgcctactccagttcctctcatagtggatggcacgggagaaagctcctctccgccgtacctattccagttcctctcgtagtggatggcatgggagaaagctcctctccgccgtgcctactccagttcctctcgtagtggatggcatgggagaaagctgctctctgccgtggctactccagttcctctcatagtggatggcacgggagaaagctcctctccaccgtggctactccagttcctctcatagtggatggcacgggagaaagctcctctccaccgtggctactccagttcctctcatagtggatggcacgggagaaagctcctctccaccgtggctactccagttcctctcatagtggatggcatgggagaaagctcctctccaccgtggctactccagttcctctcgtagtggatggcacgggagaaagctcctctccgccgtggctactccagttcctctcgtagtggatggcacgggagaaagctcctctccgccgtggctactccagttcctctcgtagtggatggcacgggagaaagctcctctccgccgtggctactccagttcctctcgtagtggatggcacgggagaaagctcctctccgccgtggctactccagttcctctcgtagtggatggcacgggagaaagctcctctccgccgtggctactccagttcctctcgtagtggatggcacgggagaaagctcctctccactgtggctactccagttcctctcgtagtggatggcatgggagaaagctcctctccaccgtggctactccagttcctctcgtagtggatggcacgggagaaagctcctctccgccgtggctactccagttcctctcgtcttccctggggtggctacagtgttcttgtcttcgtgaagttgcctctgattccatcctctaaaagccaatgacttatatttggcacaagacagattaacacgtaattgttctttactgaattggtatctgactgtgtgagttgactgaagcatgtatagtcgtatgtgtatctgagtgtgtttgaatgtatgtgcatgactgtgagtgcatgttcatcactgtcagtgtgtcactgtgtccatatgtgtggctgcatgtgagtgtatgactgtgtgtgtctgtgtggctgtgtgggagtgtgtatgtggtggagtgtgtgtggcgtgtgtttgtgtttgtgagagagactgtgtgtgtgtctggctgtgtgtgtggttgtgtgactgtgtgggagtgtatgtgaatgtgcatgtgtggctgtgtctatgtgtctgtctgtgtgtgtgactttgtattactctgtgtgtctgtgtgtgtgtgagagattgtgtgtgtgactgtgtgagcatgtggctatgtggagtgcaagggcctgtgtgggaatgtgtctgtgtatgactgtgtggctatgtgtagtgtgtgtgactgtgtagctgtgtggaatgtgtatgtgcaactgtgtgggagtgcatgtctgtgtgactgtgtgactgtgtggctgtgtgaagtgtgtgtggctgtgtgcgtgactatgtaaccatgtgtggctgtgtggccatatgtgactgtgtgaccaggtgtgactgtgtggccacgtgtgactgtgtgactgtgtgtgactgtgtgaccgtgtggagtgtgtgtgactgtgtaaccatgtgtgactgtgtggccatatgtgactgtgtgactgtgtgtgactgcgtgtgactgtgtggccacgtgtgactgtgtgaccacatttgactgtgtggccgtgtgtgactgtgtgtgactgtgtgactgtgtgtgactgtgtgaccacatggagtgtgtgtgactgtgtaactatgtgtgattgtgtggccatatgtgactgtgtgaccgcgtgactgtgtgactgtgactgtgtggccgtcactgttaccacatgtgactgtgtggccctgtgtgactgtgtgaccgtgtgtgactgtgaccgcgtgtgactgtgtggccacgtgtgactgtgtgactgtgtgtgactgtgtaaccgcgtgtgactgtgtggccgcgtgtgactgtgtgaccgtgtgactgtgtgactgtgtggccacgtgtgactgtgtgaccgcgtgtgacgtgtggccgcgtgtgactgtgtggccgcgtgtgactgtgtgaccgcgtgtgactgtgtgaccgtgtgtgactgtgtgactgtgtgtgactgtgtgaccgcgtgtgactgtgtgaccgcgtgtgactgtgtggccacgtgtgactgtgtgactgtgtgactgtgtggagtgtgtgtgactgtgtaaccatgtccaggcagggtgtgggagtggagagggtacgggacgggagctgcagacaacatccgagccggctgaagcccacagagcaggccccgtgttggggggaagttggaatttagggagtggtgctggattctggacagtggatgacccgatgctgacgctggcacctgatcactcacagccgccaccaggcagcatccagagcctccagcgttttcacccagtgggttgctgctgctcagcagtcagggggacaggttgtttcttcctggtctcaggccacaggacccctgaagaggagccccgtcctcagacccctccaggagccagaagtgtttcttcttggagaggtgaggggctgggcgccctctcaggcagtgcccagggagaagcaccggcgggggctggagccaccacctcaccgcctgcctgccccctcctcctctctcaacgtccagtctgcagggcaacctgcaattcacaacggccgctgcctggcctgggagctctgcagtgccttctgctggaagtgccagccgtgtccgccctgcactcgctcccagcacagggcagaggcggtcgcagagctgcatgatctacttttaagttctgtgaaagtccttctgcagtaacagttcatgcgctggccacgatggcagcaagggcagctttaagttaattcaggctgtttttggaacaggctatggggtcttgaaagcttcttcaccgccttcactccccacacgctccctgtcactggctgaacatcggtgaagagacaaaactgtgaacgaggacattatctaaagtgcagagccccacatggtgggaagctcaaatgctcactaacaggtcggccttccttttcctgatggtttttcaaacttaccgtattgtacgtggctttaagtgaaacttgagtgaaggatcctccccttcccaccccacccgcaggtgatgattttgaaaagctcccccaaaggaaccctaaattagtcttaaacacacacacaaatctatctgaggcagggaaactgcccattaagggccagtaattacccgaggctgctggggtgcctgcctggaagggcccccaccacggggcctttgtgcttcctggcctggcggactctgaggctcatgcattattcaggagcacgtgggacaataaggaagccttccatagaaagagaagcaaagctgggggtaaataaaggttgcttgagaaacactactattttttctacatttatgaaaatattgcagcgttcggggtgctggggacgtcctctctggttatcaggagaacaccctggattctgcgctttccttcctgcgggcctgcagcctgcaggggcccacaggacagcatacagtacccggggactgtgtcttttttcctccctcctctccctttctctcccccataatgcaaagctttgtcaagctaatactttaaggatcaacatcaaaattggaactttctctttctatagccacatccaattgaaagtatcttagacctcccagtggcttccctttcggggaggcctggctgtcagagcactggaaccatgcatccattttaaataacaggaaggtccccaacccatacacaacattagaaacggcattatttgctggcccctttgtgcgtggggctgtgaatcggtgctgctgcatcacatggtcaaaccaggcctcccccacacattcctgctttatggggtcatttcagcgcgctccaatcagccgcctcgtccacctgaccatctcttgattactgatctatctgctcttattttccctgggggaagggaggagatttaaagtgcaaatggtacaaaaggggctcaaatgccgctttgtgtgcagattcaggagacttttttttttttttttttttttgagacggtgtctcgctctgtcacccaggctggagtgcagtggcatgatcttggctcaccgcaacctccacctcccgtattcaagtgattctcctgcctcaacctcctgagtagctggaattacaggcaggcaccaccatgcccagctaatttttgtatttttagtagagatggggtttcaccatgtcggtcaggctggtttcgaactccagaccttgtgattcgcccacctcagcctcccaaagtgctgggattactttctcatctggcctcacaagggcacgttaagaatcctgtgcccctgtctccgccacagtgcacacccagccctttgatttcagatcagagggaatggaatctccaaggaacttcacataggaaacccaacagcaccaaatgctttctaactattcttgggaaagaggcaaggcacaagtaaattaaatatattaacaagtcggagtaaagggtagagtgattaggaatatcttcctcagagaagggatgtgacagcccaatccacaccgcagacacagatccattggacccggcctcctcccatctctaaagtcatgctctgtgaacatcgttatgacagtgaaaaccacgacttttcccctgtaaaattaaatgtcactcttgatagcataatatctgaaacatcatcttcccaagtccacaccaatactttacacagaaaattaaactctctctgtttattgagtggataatgtagccttcaaatgtgtgagaacccctgctaggtgagaaattacaaaagctgtaccataaagcctaatggtatgtatgaaatacacaaaaaggtaacctaattggtaatcagaaatcataaaactaatcatgcaattaatgtcttcaaaagcaagcatttgaggtgtgtataattacaagaaaacaatgcaatggtggtttccagcattaatgaattaattgtggtggtaggggggccggcgtgggggtttatgggctggtttcagtccatgcccactgcctggctgtgcgttctctgccttcctccacctggagctcctcagcaaaggactgtgcctctgagcctcccctggagaagtcaagaggtcccctccttccagacccaacttccctggccactgactgtcgggattccctgggggagggcaggtggagagacggctggtgcagaaaaacacagaaggcccagagccgctcattgagtgcaggtgtcggaaaaaaatttgggaacacacattaacctacgcaactctcttgctttctttccagcgtgccacacaatatcatgatacttacggttctatgattcacactcgcagtttcgaaggaaacctctgctctgtgctgattattccaggaccaaggcttaatgcgtgggatgttaatttgctgatagaaaggggaggaggaacaggtcggggctgcatggcattccttccagacaactggagcaaacagggctccacattggggtcctttcgatgtggtgccgtcaccagtgccaccccactgcaggcaccgggagctcttccacggagaggaaaggtgcagagaaagactctgaccccctgcacggaggagggggcggcgcaggcccctccacgtcatcggtgtggaacgcaggcccctccacgtcgtggatgtggaacgcaggcccctccacatcgtgggtgtggaatgcaggcccctccacgtcatgggtgtggaacgcaggccttttgaacataggagtgtgcaagccccacacacaggaggtggtgtgcagcacgtgtctctgcaggaaagggaacaggagggactggccttggcgggtggtgagacggccacacactctctgaaggagattctacattcccacttctctgtagaagccgtccaggccccagccccatccccagcctgcaccctccaggcagctgaaggcctgggcacagctagcgaggccactggcatgtgggagatggaggacagtggggagaagaaagaacactagagctgaaattcgaggaagaaaccggacatctggggcagaggaacgacccaaagccactgaggaaactgccaggtgagggccaggaggagagggtgaggctgacacggggacaggagcccagcgtgaccagcctggggtcctgaagcaatgctctagaaagagaaggccttccacagcacgaccccagggtggtgatgagggcacactgctggagatgaagaaagcattattactcctccacttctagtacgagaggcttgttcacgtcctaagttgctctgtgttcccggcaacgtacccggcactgagttctcaggactggtgcaggtcagcggctccgcaggggtgagctgggcgctgcctgcatctgacgagatagcagtatgttagcatctgtggtgttctgtctaccgcagagtcctgtgagcctccgggtgctcgtgtccgtgcactgtgacggcctttgtctcttttgttttgttatttcaggggcgtttttcttattctggcctgtgggaagatgccctggagccctggacactggttttccagcaaaccctacagatcggttgggatccacctggtgacacctgccttatcttccagggtttgcccttggtgtagagatagacaaagggagaggtgagcacaaggtcacagggacgcagccctgacctcacgttggtccacgacgggcagagagcaacttggatggctgcctttgttgtttttcaaatggactattttattcctagaaaaagatacacaggctaatgtaatgaatacactagcacccttagccagctgtaggaaaaaaatgcatggcagatactcgatggcctttctgtcctccctgcaccacccagaggacatacacagagtgatccgccctcttttccctggtgaatcacgcagcctaactcaccatgttcccggccacgccacagtgaatcacgcagcctaactcaccaggttactggcctaactcaccatgttcccggccataccccagtgaaccacacagcctaactcaccatgttcccgaccacaccctggtgaaccacgcagcctaactcagcatgttcccggccacatcccggtgaaccatgcagcctaactcaccacgttcccggccacacagggccaagaacagcccaggcaatgttaaggagcattgcatggaggagccacttgcagatgcggtaacccactgtgcggcacagaacctccccgcggggcaggtgggtgcacaggaaagaaaccaacatggagctgaggccccagagaggtccctgtgctcatgactcacagagacggggacggcagcaaggacacagcagggccatgggcagaggaaggacaagcaacgtggggccatggggagggacggaagacagaagtggatcccggctctccacaaaacacaaaaattaaccccaggcagattaaagcctaaatggggggaaaaaacctgtaaatgttttgaagaaaacatttgagcctctctgaactcagggcagaaaacagtttcctcaaatcctttcctcaaacaacacaaactacggaggaagggagtggtaaaatttgatcaaatcaagtgaagcagcttctgtgcttcaagaaacactattaaaaagtgggaaaaggtgggggtgagccacccgccaggaagcgagattcacggcacctctgtcagatgaaagggctgggtctgcgtccagccaggcaatgaagatgagccgccaatattctaggaagaaaagcgggggtgggagtcaccaaaacaagtcttctgaaaactggccaaggtgtgatgtacgtttgcatcctaggaaattaaagaggtaaaaaaacccatctggaaaaccaagagctgcttgattctatgaacctaagaacagtccgtttctccttcagagacgtattgagagaactcggtatcattatgaaatctctcaggcctccaggaaatgacgctctaaaaatgcaaagctctgaaccaaccaccgagaaacaccctttcccctcccctgggtgatactaagctgctgtggggcgtccccacaattttggggccggaacggagggggaacaggcaccagtttgtcactgccctgagtgcgctgccccaacaccctgcctgctgctgtctgagagaaaatcgtgtcatggatcatcatccctgtgctgcaggtgtgtctgatgtttacagagacctctctcgctccatcatgcgtgcccgatgtctacagagccctctctcactccatcatgcgtgcccgatatctacagagccctctctcactccatcatgcgtgcccgatgtctacagagccctctctcactccatcatgcgtgcccgatatctacagagccctctctcactccatcatgcgtgcccgatgtcgacagagccctctctcactccatcacgtgtgcccgatgtttacagagccctctctgactccatcatgtgtgcctgatgtttacagagccctctctcactccttcatgtgtgcccaatgtttacagagccctctctcactccttcatgtgtggccaatgtttacagagccctccctcactacatcatgtgtggccgatgtttacagagccctctctcattacatcttctgtgcccgatgtttacagagccctctctgactccatcatgtgtgcccgatgtctacagagccctctctcactccatcatgcgtgcccgatgtcgacagagccctctctcactccatcacgtgtgcccgatgtttacagagccctctctgactccatcatgtgtgcccgatgtttacagagccctctctcactccttcatatgtggccaatgtttacagagccctccctcactacatcatgtgtggccgatgtttacagagccctctctcattacatcttctgtgcccgatgtttacagagccctctctgactctatcacgtgtgcccaatgtttacagagccctctctcactccatcaggtgtgcctgatgtctacaaagccctctctcactccatcatgcgtgcccgatgtctacagagccctctctcactccatcatgcgtgcccgatgtctacagagccctctctcactccatcatgcgtgcccgatgtctacagagccctctctcactccatcatgcgtgcccgatgtctacagagccctctctcactccatcatgtgtgcccaatgtctacagagccctctctcactctgtcatgcatgccggatgtttacagatgtttacagagcgctctctcactccatcatgtgtgcccaatgtctacagagccctctctcactccatcatgcgtgcccgatgtctacagagccctctctcactccatcatgcgtgcccgatgtctacagagccctctctcactccatcatgtgtgcccgatgtctacagagccctctctcattacatcatgtgtgcccgatgtttacagagccctctctcattacatcatgtgtgcccgatgtctacagagccctctctcactccatcatgtatgcccgatgtttacagagccctctttcattacatcatgtgtgcctgatgtttacagagccctctctcattacatcgtgtgtgcctgatgtttacagagccctctctcactccctcatgggtgccgtatgtttacagatgtttacagagccctctttcattacatcatgtgtgcctgatgtttacagagccctctctcattacatcgtgtgtgcctgatgtttacagagccctctctcactccctcatgggtgccgtatgtttacagatgtttatagagccctctttcattacatcatgtgtgcctgatgtttacagagccctctctcattacatcgtgtgtgcctgatgtttacagagccctctctcactccctcatgggtgcagtatgtttacagatgtttacagagccctctttcattacatcatatgtgcccaatgtttacagagccctctctcattacatcatgtgtgcctgatgtttacagagccctctctcactgcatcatgcgtgcccaatgtttacagagccctctctcactctgtcatgtgtgcccgatatttacggagccctctctcattccgtttgatttgcaccactgctgtgagatgggcaacagttcctggctttacaggcaacaaaatgctcccaccagtcaatgaagccacagagcttgccaggagtgaatggggccccacctgacagaaatgacggcttccgcgggatcccatgaaggttctgtaagccagagctgaagtgagtggggcccctgtccgcaggctgccacctctggcaggtcgtccacaggaacgcttgtcctgaatggtggcccgcaccctgcagtgagcccacggctatagtggtgcagccagcagccccgacgcctctgcagtcccagacccagggaagccccgtgtgcaccacggtgtgccctggaccactcacttggccgctgccaccctgggaggatcacaggggctgccttctggacatatgtcaggctctcactgccccagtgagaggactggctctggtcctgatccacaagctctgaaccaatagcgggtcttgggatgacgtctgcggagcccctcggtcccagcgtggctggcgtccaggaccccagcacctctacacccaggtccttctcagttcccaccggccgggctgacgctggtctccagggtgatggagctgattcttcgggtttccctcagctcagatcaaatttaacacagcaagaggacacccactgttcccaccgaagaggcagaaagctggagttcgcggtgcctttctcccccaggctgggatggaggaggcagcatgaggccaccgtcattcccagtgtgtgagctggggccatccggaagttgcgattcatgtcagacactacggggccgaggctcatgtgggtgtgcgtcctctcagggtcacacctcagcaaggaagctcagcagaaggtctcccaggtccctgagccaccgttcctctgactgcttgtacccttcccgagatgctgctgcagccccacgccactcagagtgaccagcctgggccaacccctgggttctgacaagatgtgctgtttaggactaaattcagctgcatataacagaaaacttctgacaaggttggtgtgaacacctgaggcttttcttccctcccacacaaaacccatctaaatgggcagtctgggtcccgcatcctggccagggacatttacgggaaccacatcagcctaggatccactatccaggtggccgtcatttcccatcaagaagcctttctgcccagagtactgtacagccacagctcatggccaggtctcactcagtgaccacatctaagcacaggggaggccaaacgtgttattttagctaaacttagggttcgatcaccatggaggaggggaagacggcacagacccttcaccgctggccctgatggcagctggggcccgtgtgtgccgtgtcctggggacgacatgagatagccaggctccccgtccctcagggatggtcttccaaggattggagcatcttacacgttttttatttcagtttaaaccactttctactcatatgcttttggtttaaataaattgccagataaaatttgcttgaaaatcttttatgggaggaaaagagaacattcataacaaacagagctcaggttatcccctctccacccaacaccagcatttccaggcctttgaggaactggggagaaacatgatgtggtcagattccaaatttccgaagtgcggagcctcaggctcacataagggatcccaggtctccaaatttccgacatggggtgcctcaggctcgcgtaagggatcccaggtctccgaatttccgacgtgggtgcctcaggctcgcgtaagggatcccaggtctccgaatttccatttccgacgtggggtgcctcaggctcgtgtaagggatcccaggtatccgaatttccgacgtggggtgcctcacgctcgcataagggatcccaggtctcccggggcctggtgtgtgcaccacagactacatattccacaaggaagctgtgagaaagaagcacagacagtcctgcaccatctcacatccaccaaatccagaattctcctttctcaaaccatccacagactaacttattcagctccccacaatatgagtctgttttgaggccagggggtgggtcctggaccctccaattccttgacagacaaaaggtgtagaatagcctgggattccaggttcctgggagtcctgcagggcaggtgcaggctggggcatggaggcggaagcttcttcacaccacaagcggccacggtagagttgacgggagaaaccaactttaaattcatgcaggatcaggaatgctgtgccacatcaatgtgtaaaatacaatcttcatgtgggagaacgaatggtcatctctgaaatatgctttgcacattaggatttttcagatcttccctattcttggtttacccaaagcaaagcgagttcttgctggggtgaagggtggaagagaaaagcagcggaatgggcgggctgtcgaacaaaaggcggcgagggaggtaccgtgcagagcctgctgggccttctgtcccatggccccgcacaccggactcacccagcctccagccgctcctgtgcctttctgcctaataaatatctgtgataattaccaacccccaaaaagggttctctaacgagggtgcattttatcagtcccttaacgaggctgtttgggttcctgcctcctatagagtggcggttaatgcttaatcagcaaatgcactgtttaaataataacaagaatatcagcagagaatctaaattatcccttaacttctcaaaataatcataacaggcatttgaacattcatacaaatatggctcatgaataaaaatgcgctttctttaatacaaatatagtctgatggaaagtctctgaaacccaacctacggaggcccctccctgtcatctcctggtgcatggaacagcgactttgccatcactgaggttccgggcacagaacctgcctcagtccagcgtccctatccgctgtaagaaagggtgaaggatccagtatgggagatggagattgtccatatcccgagggagggactggccagggcacacccgccaagggcaccttgtgtccctgctctgcagagaccgcccagctctaggtgcctgagtgttttctgctctccacatttgaaaccctaacaaaacccctgagcaatcaggccgtgtggaggcaaagagcctctcctgtaacagtgtggtccttccagccttctctcacatgcggaatttggcagacagtgatgtgagacgctcacatggcaaactttcttttctgtttctctttggcacaaagcctcagcgctcccgcgcctgccctaccactgaacaaaacagcctcttccgggcccagctcacttgtgcctccgcccacctcgctgcgggcaacacccgttttcctaaagattgacaagaggacgtgttactcaaataaccacccgctcagaagaaaaaacctctgtgcagagccttttgtgttgaaaacgacaccttcacgttatcagccttagaggcaggtctgtttgcagcggtgcccgctgaggagtctggatttttaaaatacgccagaaatgacttagggtctcagccaacagaaccaaggaaagttatatttatgtgggaattattttgtcaaaaaagttccaaaatgttggcaaactctgctcaattatataagctttcacctgaaggcacagtatttttttaaaagtcagtttgtgtatctctgttgaaaacaattatgaaaacaagcattaaataacctgactaaaaaaagtagaatgaggttcacttccatggaaataattttattaacaaaattcagaagaccaagctgagaatggagatctgcatgttttaatcaaatgctttctaagccaagtctcctaccctctaacagacgaccatttttaaattgaaagtttaaataggttgatcttaaaaacacattcaatggtgaaggagtgtgtgtttaaaataaaagtgtttatatttttcagattttgttttctcctgcttccttaaaaaatacactggccgggtgcggtggctcacgcctgtaatcccagcactttgggaggctgagaagggcggatcacgaggtcaagatgctgagaccatcctggccaacatggtgaaaccccgtctctactaaaaacacaaaaattagctgggtgtggtggtgggcgcctgtaatcccagctactcgggaggctgaggcaggagaatcgctttaacccaggaggcagaggttgcagtgagccaagatcgcaccactgcactccagctcggcaacacagcaagtctctcaaaaaaaaaaaaaaaaaaaatactagcacagtggaccctgaagcgccagcagcaaaccctctgagatgtgcgtccggagtggccatgccaccagctttttctgcccactgttttggaaaagtgttgattttggaatgtggtttcccatcactgtgtggaccatgggtgaatggggagggtggatggtctctggggccgtcctctctccgcctccagatcagcaggcagtggatgggtatttgggtctttcttgtactcacacggatgcgatgtgtgattcctggtaggaaacaagaagcagctcactggcaacaccacactgccccttgcattccgaggagtcatgtagtcatgaggggcatgagcaagatggagacccagaggctcacgctcacatgatgacggccgagccgggcctgcaacggaaaggcctgtggcatggggtaacttcagagccttcttctcaacaggcacggcccgcagagccactggaggtaaggatcctctccagccagggaggaagcatcccgcaccgtgcccactttaaaccctggagaaccatgtttgcctctgtctggccctctccccacccccccacctccctttgccgtcttctttgtgtgtaacctttgtgtacaggctgaagagaaaagtcccaaaatccagcacaagccccgtgaccctttctcccaggcccacggtcttggggcactttctcagggcctgaccttggagcagacaagagctgagcgctcaggaagggaactgtccgaggagcctcctccacggcggaactggtgcatcatgtagaataaccgagccacacgtgcggagatgctccacgccccactgcccgtaggtctgagggagatactccccgtgttttgggatgaattgagttccccaaattcgcatgccaagccctaagcccagtacctgtggacgtgaccttatcggggaatagggtctttgtggaggtaactggctaagtttcaatgaggtcattagggcgggccctaatccaacaagacgggggtccttatcaaaggcggagatgcggacacggggcagccacagggaacaccgcgtgaagacggagacggcacccacaagccgaggagagagatctgggacagattcttctccgagggcctcagaagaaaccagccctgcccacacattgaccctggactcccagcctgtgagtggtgggcgatgaatctgcggtttgcgccgccccgtctgctatgctgtcacagcagccaaggccactggctctgtgcatttccctgcctccgcctccctctcccatcactgacgatgcagcactgactccctggacagggcctacattgggtgctgctgatggcgagactgtcatcccccgacatgaaggcaagggctgggctcagaagcctggataccgtggctgcctctgccccaccctcagctctgggacaaaccttcagtcccagcctgtctgcccacgtctctccagctgtgcaatcggcacacccacgtccacgtggctcctcatggggccaaagagcagccgtggccaggaaagcagtcagagaggcccagggttgaacccaaggtcactgcccttgtggttgagcaaaatgaagacagttcctcttcttaaatccggctctgtgcctatgaagacggaagcagcagcattccgcttgcaggtttttgaaaaaacaaatggggcaagagaggccaggaccacgcctgactcaggcgatcggacgggcagggaggctgcaaggcatggcatgagcaggtggagctgtcaggactgccccagcccctggctcaaagatgcccgaccccaggaccctgcctcgctggatggtgaaggccaacttcccctctgttggagctggcctgggcgttgtgggaagggctgggaggaggcccaggacaatgcagaacagacaggacgtttcacagagcaggctgccatgtccctcggggccttgggggctgctgaggccctgagaaaggtatgcatcggggaggctggctgtgctgttgcagggatgtgtgtggggctggatcggggaggatggctgtgccgttgtaggggtgtgtgtggggctggatcggggaggatggctgcaccattgcaggggtgtgtgtggggctggatcagggaggctggctttgctgttgcaggggtgtgtgtggggctggatcggggaggatggctgtgccgttgcagggatgtgtgtggggccggatcggggaggatggctgcacggttgcaggggtgtgtgcggggccggatcggggaggatggctgcaccattgcaggggtgtgtgtggggccggatcggggaggatggctgcaccattgcaggcgtgtgtgcggggcttgctgactctcgtgctctgcggacgcccagggagcggccccaacccacgcgccggcttctcgagctcggcctcttaagtgacagactcaaacacctgagcaacaagtttcctggggtcacctaataacgattattttaacaacagtttccaaacaacaaacaaacccatggagcacgaaacctctggggaccttttgaagctaaacgctgagtggtgccgcttcttggggagctcaaggccagcagggtccctcctacagcgaccctggacagtggtttggggattcacttgatacaagtaattctctaattaggataatctggatgcggcctgctgtgatgtagtgatggggcttccctggaaggggggatgtcaggaatagccctcactgcatagagcacatcccggcgggagcgttagagctgagggatgcctgtggctgagccgagggagagccggagccaggaaagccactgattgggcccaggggggcggcgatacaaagtcacttttagaggatgaggaaaagatgaaatgaacatctaaaaactaacgccctctatgatttaatgaactttcctctctctaaaagtactctggtgattatttcagggacagccacccaactgcacggcaccatcattttttctgatactgagttgatattttgccctacaggtcactggaggcctggccggaagtgcagggttatctcagtacttgatttaaggctcctgcagctgaaaagctgccccacacggcggaccgggtggaggaagtcagctgtgctgcttaaccgtggagtctccgtcccggtcctgctcaccagctctgcaaaggccttgtcctccctgcctgattctcggcaccatttttaacacggtgggatgtcttggatttttatgataataatttcagtatatgttcaacccatggaaacatttcatttggaaagatgtgaagtgggttagaaaatgtcatttccatgctttttagagtcgtgactgtggatgactttataggagacccagttgtctgaaacatttcacacggcaatgaaactatttccaaatattcattttcaaaatgtgccacagctggctgttttttgttttcgcttttcaagcacacacattttctcacacacagctcagatgtctattttacactgaaggtttattttactggggagtgtttgctggggcgtcccgttcccaccacaggccggtgcctccgaggctcagccttcaaccctcttacatgagtttgccgcagacaaccagcaagccgtgtgtggcacacagttctactggtttctcctggctttattacaaaatgtatcacaaaggttaactcacagtagtgcaaaggtctcatttttataaaatggataaagtgacaaaatacattaaacatacaaaattcacttcttgcacactgagcttcaggtccttgctgtgctgcaatgatgtgtggggtggatttcatatgacctgctggttccctcacctcacccagaatctttttcgtatgtctgtcagtcaaagtggtcacttcatccatagttattccaatttttaaaactttttttgacctgttaagtattgcttagcaatgagtgtacaccaagaaaggtttgaacaacctgtacattcacccaactgtgtagcagacttccacggctcatgatttattctcaaatttttctccaaatttttagcagcatcttctatttatcttccaagcattgctgacaagggaggtggccaggtttgcaaagctgcagtgccatcagcttgggcgccatgagtgggagtcacagccggggccacagcacgagggcatggccatcggcattgctggtggagctggggatgctggagggggagggaggggaacgctggatggggagggagggggacgctggaaggggagggagggggatgctgcaggaggaagctggggctctgctgtgcccaacactgaagctgggcccgtgtggggcggagagttgatttcaccgttcctgttttccctcaagcctatggagaggccacgttgagtccagaggtccgtgcgcctcatggccacatcacggcacccgttcacccacacaagggccaggagcatcccctagggaggaggagatggcagatctgcacaggctctgcgctcctctctctccggagcgtcctctcctctgtgtggcaggctcggcgcgtgatggaggagccccttctgcagggctctgtttagagggtgcccgccccacagcctgtggctgctcctactcatgccaggtgaggctcctacacccaccagtggccaccggggagtcacagctccttctgcatcatccgcctgacctgtttcctcatctgggatgacaaccagatccagctctgaggtccgtgccctgagtagaaaagttcacacagcaaagtttccggagccttccctgacgcgccacgtgtccgtccataactggtcatcctccacatcctgtgaggcacgtctcagcacctcttcgtgcaagcgcccgcactagacgtttgagaaacagatgtgagcaggcgtggtcctgacctccatcccgaggttgggggtggaatcacaaagcaggagtgtctgccaggagcacgtgtgcccacacagcaggcctggccccagtggctcagatcaggaacagacacgtactcaaagacggcgggtatgagaaagccttgtgagggaagggagccctttgtcggggggcctgaaaagaaacacggcctttgctggttctctgagtcagccccccagctaccacccacactcctgcagggagaaccccgtcaccacccacactcctgcagggagagcctcccagccaccacccacactcctgcagggagagccccgtcaccacccacactcctgcagggagagcctcccagccaccacccacactcctgcagggagagcctcccagccaccacccacactcctgcagggagagccccgtcaccacccacactcctgtagggagagccccggccaccacccacactcctgcagggagagtcccccagccaccacccacactcctgcagggagagccccagctactgtacacactcctgcagggagagccccagccactgtacacactcctgcagggagagcctcccagccaccacccacactcctgcagggagagccccccagccactgtacacactcctgcagggagagccccggccaccacccacactcctgcagggagagccccccagctaccacccacactcctgcagggagagccccgtcaccacccacactcctgcagggagagcctcccagccaccacccacactcctgcagggagagccccccagctaccacccacactcctgcagggagagccccccagctaccacccacactcctgcagggagagccccccagctaccacccacactcctgcagggagagccccgtcaccacccacactcctgcagggagagcctcccagccaccacccacactcctgcagggagagccccccagctaccacccacactcctgcagggagagccccgtcaccacccacactcctgcagggagagccccccagctaccacccacactcctgcagggagagccccccagctaccacccacactcctgcagggagaaccccgtcaccacccacactcctgcagggagagcctcccagccaccacccacactcctgcagggagagccccgtcaccacccacactcctgcagggagagcctcccagccaccacccacactcctgcagggagagcctcccagccaccacccacactcctgcagggagagccccgtcaccacccacactcctgtagggagagccccggccaccacccacactcctgcagggagagtcccccagccaccacccacactcctgcagggagagccccagctactgtacacactcctgcagggagagccccagccactgtacacactcctgcagggagagcctcccagccaccacccacactcctgcagggagagccccccagccactgtacacactcctgcagggagagccccggccaccacccacactcctgcagggagagccccccagctaccacccacactcctgcagggagagccccgtcaccacccacactcctgcagggagagcctcccagccaccacccacactcctgcagggagagccccccagctaccacccacactcctgcagggagagccccccagctaccacccacactcctgcagggagagccccccagccaccacccacactcctgcagggagagcctcccagccaccacccacactcctgcagggagagccccccagccaccacccacactcctgcagggagagccccgtcaccacccacactcctgcagggagagcctcccagccaccacccacactcctgcagggagagccccgtcaccacccacactcctgtagggagagccccggccaccacccacactcctgcagggagagccccccagccaccacccacactcctgcagggagagtcccccagccaccacccacactcctgcagggagagccccagctactgtacacactcctgcagggagagccccagccactgtacacactcctgcagggagagcctcccagccaccacccacactcctgcagggagagccccccagccactgtacacactcctgcagggagagccccggccaccacccacactcctgcagggagagccccagccactgtacacactcctgcagggagagcccccagctctgcagcacagaccccagagacagcatgcggcttcgtgattcctgtggagcagagtggggacagcctgctatggagcagcagcccactgggggagcctcgagacttgcaacgacccagacccaattccctgaggccccagcctgtggtggcagggcccacagcctgcgatctctgcataccctggatttcagaggtcactgcagtcaggccacctgaggacacacacctgagggtggtgcccaagccaagactctctctagggatgtccacgtgaccccagagaagcagcccaccccacagtccacccacagccttcgcgcctctccaggagctgggccacttttcacacacaggatccacgtcttggttattatcgaacactcttggagcttcccaagactgcagttttaaaagaaatggcggagttggcagtatttggaggtagtaatgaattttcatctttgttctcctataggaacgtttcagagctgagtccacatatctaattgagtgctgtgtgaacgcgtttccacgctggaactagataccactccatgcaaatctcatttctgttctttaacgatgccttttaatatctaatctgggccttaatatctcgctcactaaacgtgttgagataattagatgatagagctagacaattactctgtgggtagagagcagacagtttcttatatttatacaaatacacatagttaaaatgaaacagaactggcagcattcacggtccgtccaaccagggaaggccactgacggccggggctggtcagctcaggcagcagctggccgggtgcatttctatttctagtttttcacggaactgaccaggcaattcagtcagtagctgtcaaaactggagtccagaacaggcacagatgggctggcccaaagttaattaaaaaccaagaagaggataaagaaatgtggcccagtccagggagctgtggagaggtggggggcagggtgaccttctctttcttgtgggggttggaagaggaaccccacggcacagcggacaccatgtgggaccccagcacgggcgctttgggatgtcggcagaggcacgcatgcctccagggatgtgccagctcagggaggcaccctgtgcgtgctccatggtgacactgccccacggggtccaaatgctgaattcctgtaccttttacatacgtgaagtctatacaataatggaaccgaagccctctgtggggaatccgtgggaggatgagaggcctggattgcaccggaagcacctccggctggagctcggccaaggagcccgggtcccttcagtctgcgctccctgcggtgggcagtggcttctgtgttttgccgtcgaggtgcaacatgcagctggtgatgccctgtggcatctgcctcctgccctcggacatgctggcccgccctccctgagtcttgcagggcccagccgctgtgcctctgtgtggcctccccaccttacctgcagacacgctccctgtactcaaagccgagctgtgtgaggcttttggggctgccagaacaaaggactccagacggatgggcttgaaacagtggatgcctgcagtctcacaggctgggtttggagaccttgcttggaggtgtctgcagggccttgaaggggacaccgacccttcctgactcccagcctctgcgttgccagcagccctcggcccacagacacagcgcttccctcctgcctccgagccacgcagacggcttccctctgcatgccggagtctgtcctctccgtcgcagggacacggatgcttcgaggactctgtgtgccggagtctgtcctccccatcacagggacactgctgcttcgaggactctgtgtgccggagtctgtcctccccatcacagggacactgctgcttcgaggactctgtgtgccggagtctgtcctccccatcacagggacactgctgcttcgaggactctgtgtgccggagtctgtcctccccatcacagggacactgctgcttcgaggactctgtgtgccggagtctgtcctccccatcacagggacactgctgcttcgaggactctgtgtgctggagtttgtccttcctgtcgcagggacatggccgcatcaaggacctactgcagcacggtgcctccttcaccaagcgaactgtgtctgcaacagtcctatgtccacggaaggtcccattctgagctgccgaggtccaggacttcaacatatctttctgcggagacagttcagcctatagcattagctcatgtgccctctgttaggaagttccctgacagacttgagcccacggctaggggattcccttctgaacacagaatgtcttgcttatttcacacgtgtgctaatttgctgtacaccaccggcttatttaattgttgtgcatttattgtatttctccactagattatttactaactggggtcaggatccatgactttttaacattgatattcatctctctttttagaacagaaatgggtgcccagctggtcaacatacatttgttaccttgctttaaaatgccttgagagtggaaccaccggtgcaggcttggctggtcaagaatcatgttctagaaattatttccagtgctgagcacagtccctgagatttaaaaacgcttatgggatgaatggaaaatagcagggcctcttaccggcctgcaacgcctttagaggcacggatgccacgtgcacagacccagctccgggaagcacaagcctggtggtgtgcgggaagcggcgaggtgcgcgggaagcggcgaggtgtgcgggaagcggcgaggaccggctttaaagtcacagcagtttcctgaaagatgagggggaggaggacagtgacgctcacagcacagccacttgtcaacttggacatgacacacacaaagcccagagctcggacggcaccgcgaggaggctgggattcacgtcaggcggcacttggtgggcagttacaagaaaggacggcagccaagccagtgcctcctgtgctccggctctggggccctggacacacctggggattcagttttgcatggaccagcattctccaagcgctctgatcagtcttacaggagaagtaggctgtgtggtctgggagccttgagaaggttccgctgtaatctgtcagacttttggacaggatttttctgccttacgtggctgatgtacgtctgcaggagggtagcacacggcaccctctcggcctgctgtgccacaaaacctttgcttttacaggtctcacggagccagtgggctgcccaatgccccagtgcagagtggagacgaggtcttcccctccttcccagcttgcctgggcggcgacgcgtctcagagacctctgccagggtcaatcctggcccatgctactagctcggggtgtgaagtcacagttgatgctgaacacctggctgggccagacttgtgcccaagaaaccttataccaccaactggttttcaaaagaaaaaaattaaaagtaattcaaaactttgagatataaatataattctttaaaaactgcagcgtggttcactggccctgtgatgggctgaatgcgcccccaagttcatgtggcagccttgacccccaggacctcagcgtgtggcgtcttggagacaggggctttacagaggcgatgaaggtaaaacaagctcttatggcgaccctgacccagcaggaccggtatccttatcagaaagggatatctggacacagagacagacgtgcacgtgtggagacacctgaagatgaagatggcatctaccaggcgggggagtggcctcaggagaaacgggctctgcccacgcctcgacctcggacttccagcctccagagccgtgtgaaaagaaacttccatcatttaagctgccctgtctgtgggactttgcctcggcagcctgagcagacagtacaggctccaaaaacgctctctgcatgtgtgattctggccaggaccaccctgcccgaagccacggctatgtcgaagctaattgtgcgatttctgccggccacgtggttttgatccaaaagcatttgaaagctgctctgaagatgcagaaaagctgagtcccggcatcgctgctccttccaagcgactgttcacacacagggtgtgagtgcgtccccccatccagggtccagcctggcctaaggctcactgggcaccatccagatctgtgactgggtccccccatccagggtccagcccacccgaggttcactgggcaccatccagaggccccagatgccgacacctggggacgggctgtatcaggcagatgtttcctcccgggctccacctggggacgggccccggatgctgacacctggggatgggctgtattaggcagatgttcctcccgggctctagttttccaggccgacaggaggaagtcctgttggggccaggggaggcattggggatgagattgagaggatggtggggtcgcaaaggtttacattgcctgtgccactttctccaaggtctggggccgccaccctgtggtgcctctggaagctgccatgtggggctggcccacggtgactggccacggcggggctgtgtgtggtatgcacctgtgagctgctgaaacgcagcctggcggccaggaaccagctgccccatcctctctgcaggaggtcaggtttgagcacgtattccctcaaacgctcatagacgtcagtatctcaggacaaagtgcttgtctgagacccaggtttgggccccaaggtggtaccatcgagggaggcatgttctggcaggtgacagcccctcctctgtgcctgaacctgcagtttctgcccccgcataaaatgccgccatctcaggccctccctgacccccaacctgcacaagggctcacagctggcaggcacctgtgtggggtcgtggtaggacctgtgtctctgaggtccagcccaaggctgtgccacataggcccaaatccaagcactcccctcctgggcacgtggctgtgtgtgcatgtgtggctgggtgggcaggggggttgactctggccaccgaaatggagaggagcggtgcactccctgggtctggcccacgcaggctccttcccaagtgctgctgccgggaaatggaggtccctaggtgagacgggagccgggcactgtgggggtggcccctgaggggctgcaggttggcactgcccagctgacgcattccgcagtcctgcaccaggggatgaacgaggaatcggcttctgctctgctgaacatcccactggttcatgtccacttgtttgggtgatcctaactgatctgctacctgagtttgaatctcagcgctattattagtcaggggtcctggaggtgggtgaccccacctcacctaaaccacagagatgctcatcctcatgcatgcacacgtccatctcagcttcagctcgcaagcaggaccctcaccgtggggccacgacggaccctgcaaagctggtctgactgtgccgagcctgtcgggggttgggggaaggaaggcgggagctcggcatctggagggcagtggagaccctcagcgagtgccaggaggatctgctgtcttcccagtgttgtcttcacagtggagagatgagttcacacagccttatctgtgtttccagtggcctctgtgtgcaagacgggccacgggttttgtgcggtatttgcctgtgggtcacagccaggtgaatgggccctcctggggctgcagccccaggtcctgatgttacttgtgccagcctggccacagtgcccggcctccagaagctgctgtcagaggagcagacgggagggcagggtggacggttaacagggtcaaggccccagagccccacaccctccccagcagccagcacaccctctgttctgtgacctcgcccctgcattgcggcaactgacagatgctccccggcctccttccccgctgccgcgcaacctctgacagccacgtgtactctcctgctttagaacaaggacctttcccttttgtgcatgaatacgctctcagcagatgcgagaaaatgggagtcaaatgcacctttgtggtttcttttccttctacacaaacaccacttgagtgaggcccgggttctgcaaagggaaagtagtcgtcactttctaggccccaccatgagccggggctcaaatcccatcctggcctgctgggcatttgtttcatcaattaagagtcagtgagcaggaaacaacattgcatattcacacaaacacacgtgcatatccaaatacacatacacacacatgcatatgcagagttatatacatatataagcacacacatacacatgagcacacacacgtccacatgtacacacatacatacatatgcatgagcacacacacgaccatatgtacacacacgaacatgcacgatcacacccatatccctcgtgtacacacacacacacatacacacagtgctcatgacctactaaacagcgcatgtgcctctcagcccttgccatgacaaccatgaggtctgcaggaaacacgtccatagaggtggagctgaggctggtgtgcattctcccaggcacccagcatgagtgcccagctcagggtctgcaccgaggctgtctggcccgagtcccaggctcgccccagtgcttgccacacacaccctggggtctcctcagaagcagtgcctgtgccccgagatgcacggccaccaccccgcccctgaggccctggatacacggccactaccccgcccccgacgccctggatacatggccaccaccgcccccccccgacgccctggatacacggccaccaccccgcccccgacgccctggatacacggccaccaccccgcccccgacgccctggatacacggccaccaccccgcccccgacgccctggatacacggccaccaccccgtccccgacgccctggatacacggccaccaccccgtccctgacgccctggatacacggccacctggatacacggccaccaccccgcccctgacgccctggatacacggccaccaccccgcccctgacgccctggatacacggccaccaccccgtccctgacgccctggatacacggccaccaccccgcccctgacgccctggatacacggccaccaccccgcccctgacgccctggatacacggccaccaccccgtccctgacgccctggatacacggccaccaccccgtccctgacgccctggatacacggccaccaccccgtccctgacgccctggatacacggccaccaccctgtccctgacaccctggatacacggccaccaccccgcccctgacgccctggatacacggccaccaccctgtccctgacgccctggatacacggccacctggatacacggccaccaccccgcccctgacgctctggatacagggccaccaccctgtccctgacgccctggatacacggccacctggatacacggccaccaccccgcccctgacgctctggatacacggccaccaccctgtccctgacgccctggatacacggccaccaccctgtccctgacgccctggatacacggccaccaccccgcccagactgaagggtgacaccagaggcaaaaagagtgaactagattcacgtaaatcaacatgaataaacttcaaaacagaacagatggaaagactggaaaagtccacgcactaatgttcattcaggcagaaagagtgagggtccctcccagaatccagtccagggagactccttctcttcctttctgcatgggcccgaggagctggtccctagactgctcagatccaatccacagtccgtgagcaaagggccgcaggcgtggtggaggtgtgcccaggcccagcatgcccccagagtccacaagagcaggactgggggcaccgtgcctgcgccagcccaagctgcccagacttcctctggacagcaggcctcctgagccctggagattaactcactgccgcaggtaggatcacctgagtcctctaggaacccagcccgcatcctgggcaagaggcccacatgcaccttagaaagggcccgaaacagttcacgagtggggtgtgggctgtgggtccagacacagttatcctaaggccaggcacaggaagggttcctttcccgatggctccgacagcccagtggtgcacctacaactgcttcccatcgaggtggtgggctgggactcggcaagcccatctgaacagggctctctgcaggcagccccaggcctggagtttgccaagtgatgagttttcctgtctgagcttgtttccatcatctccacgatgaacgtaggacaccaggacattggatctctgcggggcagcagctcatggcccagctgtaggaaagcagacccagcctctggattaaaaccatgcctggaggaaactggccttgtgagtgtcagggctgcgctgctgtcttccaggtcctccctggtttaatttagcaaaactaccaatgccaagaactggttaaattttttaaagggaagaaagtatgacacatggagaaaaaggtgcagcccatttcccagcctgaggactggccggggaaataactctgagccctcgagatgaggggctatgccttcccttgctcactccctccctcacccacctgcccactcgcccatccactcaacagcggtcgttcttcattgtattgtgagctccctctgggctgtgcactccgggccatgcgtggctggtaactgggaaatgctcgacatggaaaattctgcttgatcatctgagatgccacctcagtcttggggaactcaaggccaggagggtcacacaacccatttagcattgcctagcaccagtggtgaggccaggcctcccgcgccctccatctttctgccaccacagtcgtttggggactcagttccatgtagaaccagatgaagattcataaaggccagtgggataaagacttcccaatgtcccgaaacaccctgacacgtgtaattccaaatctgtaagtactaagttttaaaatgcgtgtgagcaagtcaaatttctgatgtttccctggatgacaagatgttttctttattaaaatatcaaggtctttctacaaatctttcctgatacctcaactttgccagggtcctaagcgtgtgcttaggtacttgcagagcctcccagcatgggaggtctgggtagggccttggaggcctgctgggaggtctgtggactccaggccgctcacttatccccatgcatataaaattcctagggataatttcatttgatgacagagttacacttaatgccaaagtaaagaaaaagtttacatttttcctgagttagcagacaaatataaggggacttcaaaaagttcacagaaaaattggattaaaaggtaaaaataaaaatataaactttatttctcaacataatctccaccagggccaagacacttttgcaagggatcaaacccaccatttagtccattcccaaggcactgaggaccttgggaatttagccacatcaatgcagtctttttcccattactatctaaggaaaaatgggtaccctctggatatattttaagaatggaaaacaaaaagaagtgagaaggagccaaaccaggactgtagggggatgcctcatgagttctcatcggaactcttgctaaattgcccgtgtttgatgagaggagtgagctgaagccttgtcctggtggagaagggctctctggtgaagctttcccaggcatttttctgctaaagtttttataactttctcaaaacacccacataataagcagatgttatttttctctggccctccagaaagtcaacatgcaaaatgccttgagcatcccaacatctactgccatgacctttgctcttgatcagtctgctgttgcttcgatgggaccccttccgcctctcggtagccactgctgtggttgtgcttggtcatcaggatggtactggtaaagccatgtttcctctcctgttgcaattcttcaaggaaatgcttcaggatcttgattccgctgttaaaaatttccattgaaagctctgcccttggctgcagctcatctgggtgcaatggttttggaacccatggagtggaaagtttgctcaactttaattttccagccagaattatgtaagctgaaccagccgagatgtctatggtgttggctgctgtttctgctgttaattgttggttctctccaattaggatataaacaaggttaattttttccttgcaaattgatgagggggtctgccactataggattcatcttcaatatcatctcattctttcttaaaatgagttctccatttgaaagctgctgatttctttggggtgttgtccctataaacttttcataaagcatcaatgacttcatcattgttccacccatgtttcaccacaattttgatgtttgttcttccttcaattttagcagaattcatgttgctctgataggggctcttttcaaactgatatattctcttcctagccttaaactagatcctgttcagacatgttacaacaagttagtatgagtttattttggtgcagaaagatttttgaaatccatgcatagttttccatgatccacattttccatggaccttcttcagaatctcttccataacaagcctgatggctgcttggggtgctggctgaactcagagtaatgcctgtgagccgccaggaatcctgctctggggccaggagctgcatggcctcgtgccagcctcccgcacctgcacccccaccttgatcccccagagcacctgggttgcgtaaggggctgcacaccacagtcatctgtttcttaaagtactttgatgttgatctttctgtgagactctggaagtggagatagctttgggtttattgggcgttcgatgttggggattggatggcctggctcagagatgttgaaatgtccccgacctgaaggctcttgcagtgctggtgctgggggcgctaggccatgagctgcacagctggggtaggggcctcagggctgcctggacttccttacgaagaagctggctcccagagcttccaaagttgacggttctgaactaggcaccaatctttcctcttttctcagctggggaggcccagttgctcaaagctgtggttctcaaagtggggtccccagactggcagcacccagggagcttgttagaaacacagatccttgggccctgcctcggaccccctgagtcagaggttctggggtgaaccagcaacctgtgtgtttacaagccctgcaggtgattctgatgcaggctgacatatgagaactgtgggcctgggggatttgggttgttctgcttatgggaaagggcaggcgtgacctctgagagaacttgtaagatgtgagagtccaaaagcttcctctaaattggactcaaggtcgcgttcatcggcagctgtgatgtaggaggcaccctaggtgtttgccaatggcatttgtctctattggccgacaccaccccagggcccctgaagagcaaccgggactcactggcacaacttcaccctcctccttttatttttttttgtaatacaaaggcttgaggtacagtattatttttggagggattttttcctattataaactagtaatgtcttagggttaacatttccctaacacacatatacacatacatacacatatgccttcccacacatatgcacacatacacacacacacacagacccctaaatacctacacacccacacacccacaaaaatgcacacacacccatgtctacacatgtgcactcagctccagaacacaggatgtggccacgcatacccagcacctccccacacacaaatacccagcgtccttcccatacctgcatacccagcactttcccacacacatacccagcgcttccccacacacacatacccagtgtcctccccacacacacatacccagtgtcctccccacacacacatacccagcgcctccccacacacacccagtgtcctccccacacacacatacacagcgcttctccacacacacatacccagcgcctccccacacacacccagtgtcctccccacacacacatacacagcgcctccccacacacacatacccagcgcctccccacacacccatacccagtgtcctccgcatacacacatacccagtgtcctccccacacacacatatccagtgtcctccccacacacacatacccagtgtcctccccacacacgcatacccagtgtcctccccacacacccatacccagtgtcctccccccacacacatacccagtgtcctccccccacacacatacccagtgtcctccccccacacacatacccagtgtctttcccacacacacatacccagtgtcctccccacacacgcatatccagtgtcctccccacacacgcatatccagtgtcctccccacacacgcatatccagtgcctccgcacacatggatacccagtgccttcccacgctatgtcctcacagctgtttcccctacccaatgcccatgtaactgtgtcctgacacttggtggcctccttggtttcccggtataactaagcactgagaggcgctcttgcgcccaggccgcctgtccaactggggcaggctccatcttgcaggaggtagaaggagggtgcagagtccctgaggccctcagtccacatgcccctccttggagtgtcccctccccgccctgtcagggctcctgagagtttcctcagcttcctggcggggtagaggggtgacgggtgctttctgtgtgggccctgtctgctgctgcctctccacagctccccttcaagggccacccatgtccgcaggccacctccccttgctgggagcactcatttcccaggtggtgcttgtcctcttcctgggacacttttctgtctgcactagaacttgacagaggaagccacaaagcttcctggccatggaaagtgggaactggccacggaacaggggaactgcccctggccgtgtatgtccctcacccgagccctgtctcctaggctctcgcttccattttgcactgagacctctgcctcattccctctgaccgggcctcttgcctgccctgaagtcctgcttcctcgctgcttgtgggagggggaggctccgactgtctctcctttatccaccaatgtttccgccaccagcgagtgctgagcaagtatctgttgaataaatgaatgtgcaccaggaaagaaagcagccgcctggcctgacctcgtctgaggctctggatgggatacgcttcccagtttgctcgcttccctggagaaacccccggagggccgcgccccgaggctttgctccgacgtgtgccaaggacatgtgctgggagcgtctgcaaggtccgtctcgccgtgggggccgggaggagaacgtaccgtcctcaaggtccgtctcgccgtgggggccgggaggagaacgtactgtcctcaaggtctgtctcgtcgtgggggccgggaggagaacgtactgtcctcaaggtctgtctcgtcgtgggggccgggaggagaacgtactgtcctcaaggtctgtctcgtcgtgggggccgggaggagaacgtactgtcctcaaggtctgtctcgtcgtgggggccgggaggagaacgtactgtcctcaagcagaatttcctgcgctggtctctgggatgggcagagggccctgctttcaggtactgaggagagcgcagcactcggcatcacactgggggcacaggtcagcagggggcacctgggagagaagaggaggtggaaagcggaggaggagggatggacgaccagctgggcacaagaggggcttcagggcacggcaggagggccgtccggggaaagttgtttcctgtcccactgactttgacggctctaggtctgccacaactccggcaaagtcccaggaccctgagcagcctcgggaagagctctcgggacctcgggggagtgaggtggcccaggcctggcacagctcagtggtggcacgtcacatcacacatcttcagaccaggccttctgcaacgattctctggcctctctgctgctctgcctagctccagccttgtcctgcggaaggtgctgaagcggccctcagtctgcctctggcctccctctgtttccccctccacaactgggcaggctgctcccttcaccccaacactccatggctccccatggcctgcaaatcagatcacagcccctaagcctggactgcagtgctccacttggcctcgcccacctctcagcccattttcaacgtgacacacgcaggtgaagtggacctgacccagctcctgctttctgccccctcctgtcccctctctcctgccctgccccgatcctgcctctgcttctgtccacatggccccagccacagtgccttcctgccagccaaccatgttcacaaggaagttcatgtcccccttaactcgagcttttatttcagtgaagcttcggggtcacctgcacggcctctcgtgagtagggggatttcctactcgctccacagacagctcccggggtccggggagaagcggaggggggcagagaaggccgtgccacccagcagcacaaggcaggggtttgcttgcaggtagcaaagtaacccaagcagacacacactcatgcacacacacacagagacacactcatgcacatacacagacacacactcatgcacacacacacgaacacactcatacacatatacacacagagacacactcatggacacacacagagacacactcatgcacatatacacacggagacacactcgtgcacatacacacacggagacacactcgtgcacatacacacacactcatgcacatacacagagaaacacttgtgcacggagacacacttgtgcacatacacagagacacaggcacacacaggcagacgcaaacgtgcatgcacacagacacacagacacacgcagacacacacacgcgcacacacagacacacacacacacacgctcactcacaggcaaacagatgcccttgggtagacttgtggtctgacagccgtacaggaagtatgtcccaggaggagcccaggctgtgtcggggtcaccttgacttcactattttcgaaatgctgaattttgctgcaaagttttcctaaagggcttggaaacggtccagaccgtgctgtcctggaagtctcctgggggctccttcttcaaacaagagaaagctggggagtttccaggcgttccgtgagagccgagggagcgcgtgagggcttcctcctatcagcgtccgtattcatggtgggaggtggcaaacctctatcggcagtttctgataaccttgctccgggtcacacgttatcttcctgaagtggcagccacggaagctgcaattcaggcaccaatatcagaaaatgagtcattgccgggaacttcactgtgcagtcccagaagtcttaattccagcagacagggtgactccaaagggagatcgttccagccacttccaaggtgtctctttctccatctcttcttgcagccctgattgtggggccatggcctgtgcaggaggcgagcaagtgtgacccctggtggctgcagcagcagcagcaccttgggcctcgggggtcaggaggggctgagtccccaggtcaggcatccccaggggggcacggggctgcagagggtcaggaggggccgagcccccaggccaggcatccccagggtgggcaccgggctgcagagggtcaggaggggccgagcccccaggccaggcgtccccagggcaggcacggggctgcagagggtcaggaggggccgagccccaaggccaggcatccccagggtgggcaccgggctgcagagggtcaggaggggccgagcccccaggccaggcatccccagggcaggcacggggctgcagagggtcagcagggcaggtatgccttggccatcaccactgcagtggcctagaggtgttcctggctgtctccatctggggcagcacctgcagctccttggacagtgtcagaattcacgactccttgcaaacaatgcagtccacgctcaccctccctcctctccacgagacctcagtgccctggaccatggactgggtgcccgagtgggctcatccaagccctgtttttgtgttggtctcctgttgtgacccatcccctgctatttctgctgggcctgaggtaaggcggacagggctgaccctgaaggcaaagcatcctgggggccactcttctggaagcgaattcccagcatggagaagcctgaattaaccagcagcggccccaggacagagtctgtcaccagagcctggagacaggatgggtggctgtgtctaaagccacagcattttcttttcctgtggcaagttatccctttccttagaaaaaagtactgttggatgctgacaccaccacaaataatctagttccttggcaggtcctctcatgagtaaacggccctagaagacgtttctcccaggaagatgcacagacggccaaggcaggcagacggcggcaatcagcagcttccacgtccaccagggtggccttgggaagaccagcgcccccacgtggggctgggagaggccgcactgcaccccaagagtgaggatgggtcgggggcagcgggaatggtgctctatggggcttcacatggcccctgcaccccagggcggagaactttctaagagggaaggtcggggcagctgctgtgtgggtgccagcagccacctggggacagtgccagcacgggggcatgccgggggagcctctgggagccgcaggaggcactagggacacgcagctcgccggccctccaggaggacgacgttctgaaatgggccttgatgccctggacggcctcgctagcctttacccacaggggaaggtgcaggatgtggcagtccctggaggaaccccaggcctgagtgtggcaccagggtttcctcggggaccccatatctgagtgcagcaccagggtttcctcggggaccccgggtgcaagtgccatggtcagggtttcctcggggaccccggctccgagtgccatggtcagggtttcctcagggaccccagatctgagtgcagcaccagggtttcctcggggaccccgggtccgagtgcagcaccagggttttctcggggaccccgggtccgagtgccacactagagtttcctcggggaccccagatctgagtgcagcaccagggtttccttggggaccccgggtccgagtgcagcaccagggttttctcggggaccccgggtccgagtgccacactagagttttctcggggacccgagatctgagtgcagcgccagggtttcctcagggaccttgggtccaagtgccatggtcagggtttccttggggaccccagatctgagtgcagcgccagggtttcctcggggccccgggtccaagtgccatggtcagggtttcctcggggatcccaggtccgagtgccctacccagggtttcctcggggtcctctctcctcccctccgtgcaccccgcccacgtcacaaagaggaaggtgatgtctctggacccagcatcaaagcccgggtcttggtgggtggtgcagaaggtgttcctaacagtgggctggggaacagccaaccctccctgtgggcctcagagccaggtctcaggaacaggcactgcacagctgggagcagcagggacaggagaggagggagtctgctcagagacgtcttcttcagaaaccacattccccaagcccttcgccaaaatcatcaaaacatcccacgatcagctctgcttgaccggggagaagaggaacaggaaatatgtcaggggtgagattttaaaatgtgtgtgaatataaacattcagctctgtaacataattaacagcgccccaaggaaaatcccgcgtatgtcagtaggaagcgttcttgatgcggagcgaaggctacttggcggtgttccggctctctgactctgaagggcctgcccgtgttccttcctgaggctcagacaagcccatctcagctttgctgtctaggaatttataagtgtaagagagcaaagattcagttccccaaaagataccctcttggtggcctgtggtccacgggagacctcatgcaccagggatccccgtgctgggccggccagtgctcaagagcacggaccctgaggctccttaaaggggctggaagggtcagtgtgataccgtgcacccacacttactcaccgaggagctctcggattccgtggggctggaagggtcagtgtgataccatgcacccacacttactcaccgagaagctctcggattccgtggggctggaagggtcagtgtgataccgtgcacccacgcttactcaccgaggagctctcggattccgtggggctggaagggtcagtgtgataccgtgcacccacgcttactcaccgaggagctctcggattccgtggggcttgacgggtcagtgtgataccgtgcacccacacttactcactgaggagctctctcagattccatggggctggaagggtcagtgtgataccatgcacccacgcttactcactgaggagctctctcagattccatggggctggaagggtcagtgtgataccatgcacccacacttactcactgaggagctctcggattccatggggctggacgggtcagtgtgataccgtgcacccacacttactcaccgaggagctctcggattccgtggggctggaagggtcagtgtgataccgtgcacccacacttactcaccgaggagctctcggattccgtggggctggaagggtcagtgtgataccatgcacccacacttactcaccgaggagctctcggattccgtggggcttgacgggtcagtgtgataccatgcacccacgcttactcactgaggagctctctcagattccatggggctggaagggtcagtgtgataccgtgcacccacaattactcaccgaggagctctctcagattccatggggctggaagggtcagtgtgataccgtgcacccacacttactcaccgaggagctctcggattccgtggggctggacgggtcagtgtgataccgtgcacccacacttactcaccgaggagctctcggattccgtggggctggaagggtcagtgtgataccgtgcacccacacttactcaccgaggagctcttggattctgtgttttcaagcctgcccatgtgtaggaaaagcacagcctccatgagaacagcaggaacacaccccccaacacgcacacccaaacacacacgcatgcacgtgcatgtgcacacacacacactcgtgcacgcacacgtgcacgcacacacacacagagcaacgtcctgcagctcccatcttttctttttaaaatcatacatatttcattaagctccatgcagagtgtcttctgatttatggtaattgtcaacaaaagcaaaaacacagacaattttaaccctgcagtagctgggagttaaccggcatgaaatcatattttttttttcctttaaaaagggagggggctccaagcactcccttgcattaaactctgaggatgctgaaccaagagagacagtgtgaaccccagcattggtggctgttgtctaagaggcccatgccagaagcgacatctgatagagtggccacctcaccccacgtgagcccggcttactcgtggcctggaggactttgagtgagactaatttccatatcaaacccaatttagatgaaacgtctttgttaaaaaaaaaaaaaaaaaaagccagagcttcaatagccccttgattagattttcatctcctgagcagacaaatatgaatatttattaccatgaatgcatatttttctctttccattgctctgatcttgagtattatccactgctaatttttatgaaaatttgggcaacataatgttttcacataaactgacagtccttgagataatcccgttattgtctggttgaaaatgacagcttccgcttattcatgtgttaacgagggattaaatattgtttttcatccccgtaatctaagacggactggaaattaaaaattgaacattgtatattagcagggctctgaggaccagaatttgtttgcgttcacttagagacgatctgtaaattagcagcttcacaatcaggccctgtgatgttgctgctgaaggtagcatcataaaatgccactgacatttctaaaataaattcattactctacccgccgcacaccaaaatgaaaaggcttctatcaggaaatacatcgcaaaggaaaagacaacactgccaaagaagtaaaattgcaacacaagttatattgcttcaacatcaagaattttttagggtccccgtgctagagggggcaccggcagctcctgggaggtgtgagtcttggtcatcatgtggcgttggcagaaggaggaccctgtacatcctccctgcaaaatcacccaagggacccggcccataggcagatgcagccacgtccttctccagctctgagggcaggcaggccatctccacgctgagcatcgttgacggtgacacatttgtaccatgtggtaatttttactttattgctatggctggatggctcagactgaaccgtggatctgaagggtttttggacaaaactatcctattatccttctaaaaatcgcgctaaattttattcatgtatttattcattaattcactctccctgattgccttggtagaatttttcactttttaatttattgtttgatatggtgcaggaaaatggcatagatgtattcctctgaagctagcttgacccaatgctatcttttggaacaaatgataaaaaggcactctgagttaaatgagacactaacagggtcagagtttagagctgaattgagtctctccaaagtgcctatgggaagctctaatcccagaacttccgaatgtgactgtatgtggagatggagttgtctataggagtcattacggtaaaatgaggtcatgaggatatgtggagatgggggtgtttacagtagtcattatgataaaatgaagtcatgagggtatgtggagatggaggtgtttacaggaatcattacggtaaaatgaggtcatgagggtatgtggagatgggggtgtttacagtagtcattatggtaaaatgaggtcatgatggtatgtggagatgggggtgtttacaggagtcattacagtaaaatgtggtcatcagggtgagcctgatcccatgtgactggcatccttgtaggaaggagatgcagacacaggtgcacacagaggggtgaggacttgaggatgcagagacggcatctgaagcccaggagagaggccttgggagagaccagccctgcccacaccttgatcttggacttcagccaccaggattgtgagcaataaaggtttgtgactgaagccccccactctgcagtattctgttgtggcagccagagaggacgcacatggtcaacatggcaacaccccctcagtacaccctagacatctgaggccaagcccctgtgactgcagggatgcgtctctgcctacgagaaaggagaggatttcctgttttcgtggaacgttaagtccaagtgcttgtcaacagaagaaagttacttcttaagaatgttctttttgctttatgatctcattaaaaaaaaaaaaatagattggcacttcagtaaaagggtttgcacacacacaaccctaattagacttttaatagatcctttgtttcacaggaatgaaagtgaaggtaaagtttgtgcctgtaaactactaaagagctactagggcccagtgtctagggccctccaccatccatcagtttctaatgtaggagatgagaacacatcaccccaaaaatgactgtcatacatcagaacatgccaccccaaaaacaactgtcgaagaacagaacatgctgccccaaaaatgactgtcatacatcagcacatgccaccccacaaactactgttgaagaacagaacacaccaccccaaaaatgactgtcatacatcagcacatgccaccccaaaaatgactgtcgaagaacagaacatgccaccccaaaaatgactgtcaaaggctagaaaacaccactccaaaaatgactatcagagaccagatacaccaccccaaaatgactgttggagaacagaacacgccaccccaaaaatgactgtcagagatcagaacacaccaccccaaaaatgactatcagagatcagaacacaccaccccaaaaatgactgttggagaacagaacatgccatcccaaacttgactatcagagaccagaatacaccaccctgaaatgactgtcagagaacagaacacatcaccccaaaaatgactgtcggagaacagaacacaccacccccaaaatgactgtcggagatcagaacataccaccctaaaaatgactgtcaaagaccagaacatgccaccccaaaaatgactgttggagaacagaacacctcaccccaaaaatgactgtcgaagaccagaacacaccaccgcaaaatgactgtcagagaccagaacacaccaccccaaaaagactgtcagagaaaagaacacaccaccccaaaaatgactgtcggagaacagaatacaccaccccaaaaaactgttgaagaacagaacacaccaccccaaaatgactgtcggagaacagaacacaccaccccaaaaatgactatcagagaccagaacacaccaccccccaaaatgactgtcggagataaaaacatgccacccccaaaatggctgttggagatcagaacacaccaccccaaaaatgattgttggagatcagaacataccaccccaaaattgactgttggagaacagaacacaccaccccaaaacgactgttggagaacagaacatgccaccccaaaaatgactgtcagagaacagaacatgacaccacaaaaatgactgttggagatcaaaacacaccacctcaaaatgactgttgttggagaccagaacacaccaccccaaaatgactgtcaggacaccaccccaaaatgactgtcagggatcagaacacaccaccccaaaaatgactgtcggagatcaaaacacatcaccccaaaaatgactgttggagatcagaacacatcaccccaaaaatgactgtcagagaccagaacacaccacccgaaaatgactgtcagagaacagaacacaccaccccaaaatgattgttggagatcagaacacaccaccccaaaatgactgttggaaaccagaacacaacaccccaaaaatgactgttggagaagagaacacaccacccaaaaaatgattgtcggagatcagaacacaccaccccaaaaatgactgttggagatcggaatgcaccaccccaaaaatgactgtcagagaccagaacacaccaccccaaaaatgactgttggagatcagaacacgtcaccctaaaaccgactgtcagagaacagaacacaccaccccaaaatgactgttggagaccagaacacaccaccccaaaatgactgttggagaccagaacatgccaccccaaaatgactgtcagaaaccagaacacaacaccccaaaaatgactgtcagagaccagaacacaccaccccagaaaagactgtcggagattggaacacaccaccccaaaaatgactgtcagagatcggaacgcaccacccaaaaaatgactgtcagagactagaacacaccaccccaaaaatgactgtcagagatcagaacacatcaccccaaaaacgactgtcagaaactagaacacaccaccccaaaatgactgttggagatcagaaaacaccaccccaaagtgactgttggagaccagaacacgccaccccaaaatgactgtcagaaaccagaacacatcaccccaaaaatgactgttggagatcagaacacactaccccaaaatgactgtcgaaaaccagaacataccaccccaaaatgcctgtcagagaccagaacataccaccccaaaatgcctgtcagagaccagaacatgccaccccaaaatgactgtcagagaacagaacataccaccccaaaatgactgtcagagaccagaacataccatccaaaaatgactgtcagagaccagaacatagcaccccaaaatgactgtcagagaccagaacacaccatcctaataaatgtatgcctttttggcataaggattattttgagaaactgaagatataggagaagctctgaaaacaagttgattctcttctataagagagatctatgtttataaaggagtcctccatttgtaagggtggctcctctctgcacctggaagaggacggctctcgtcactggaaaccccatcaatgcagagggctcgactgagggtgcatgacaggccttgcccttgctgaccggcttctctggtcccctcctgtgttaatctgttctcatgctgctgataaatacatacgggagactgggcaatttatgaaagaaagaggtttaatggactcacagttccacgtggttttggggaggcctcacaatcacaaggcctcacaaggtcagaggcacatctcacagggtggcagacaagagagagcatgtgcagggaaactgccctttataaaccatcagatctcatgagactcattgactgtcacgagaacagcatgggaaagaccagcccccatgattcaatgacctcccaccagttccctctcacgacatgtggcaattgtgggagtgacaattcaagatgagatttgggtggggacacagccaaaccctatcacctcctcattgctcctcctgctctgtctcagcagatgatggtgctgaagcctgagtctacacacctctttgtgattgacccgtttctctgggtatggctcatggatgcaggaggtgcacatgtgaatccacttcggcttgtttatctcttgtgaatcggttttttgttacaggagtccacccctcgtaggaactcagaagaacagagacactactttttcttccccacacagagtagtagcttgaggccactggctcaagcaaaaggggtacctgagttggcctggatgctcagtggctgccctgataagtgattatggaaaatgtgatgccagggcggtctcaaggctggaacgacagcccccaccagggtgggcttggctccatgttcactgtctcgggagcaaggctgcccttacacctgcagcacgttcctccactccacagtgcccaggtgggcctgggctgggggcattggacacaatgcatcctggcagccacccaggcctagcctctccagggcacctgatgcccacctgggcagagaaaggcacctgagcagaagggcatggggctttcagaaggagggtccctgaaggggatgcagatgcacccgcctgacgctggaaacaagccaagttcctcctgctggccccaacaggagagtttcccctgacagacacacctctgggctctgctcatcagcgtccatgtccctagctggacaattccagggttgaaaattagggtttcccacctgtatctcatgaactctgccaggtaaaagtttcatattcatggagtataccaggtgcgaatgtgctatagatgtagctaaggacatttcagctttcaggaatctccatgagaaaaggaacttaatttgatgtggggctcagtgtagggagtgcgacctggcctgagtcaggctgcctggtgctggcaccggctgccggttctgccatgtcacttctcctgcctcagtctcccctctgtgaaatgttgcctcctggggacaagggagatgacatgcatgtgaagtgtggaacacaccccgggagggggcgagcatcacaactgttgctgccactgtgctgctgccgttctgaaaaagctgcagcaggagctttcagggtgcaggatcctgttaattttcttcatctctttaagcaactccaagtctgatgggttgacccactgaaaggggtttctggattattacacactgagggaccttatgaacatccctagagttcagttgtttaaataaaaatgaactttggtgccacgtgagccaggctccctagggaacctgcagggacaatcttgccttccactaagacccaggcacaaggcgggcctccgtttcttcagcgggagacatcaccaagtccccacctcagacaataagccgtgtccctgcgactgaaatctatattatgcatatttttataaaaatgcagctgaaaatgttagaaaagggcacagggagggagggaagcatgtcgagaagcagggactgccgttgccacaggcagacatgacttatttcatcttatgtgactatttactctgatattgaataaaaattgaatgtgttgctatagcaacagccacatcacacagcacctctcctgcctttaagtcacaggaaagtattgagaaggcatccgtgagccagcgcaacgtggaaacctgtgtgccattcacaattccaggaggaaaagatgttgtttcatgatgaactcctatttgtcaatacgtcaagtgcagttaattatatcgaaaatacatttttgtgtttttcttcacttttgagaaatagaaaaagagtgagaagagcagtaagcagcaagcaggctgatggggtgcagctgagcccaccacagtggggctgccccagggccactgaagtccttgtcacagagacaaacccacagcgggtctatcctggggccatcgaggtcttcgtcacagagccaagcccaccacggtggggctgtctgggccatcgaggtccttgtcacagatccaaacccacagtgggccagtcctggggccatcgaggtcctcgtcagctgagcccacccatgacgggcctgtcctggggccttcgaggtccttgtcacacagccaagcccacagcgggcctgtcctggggccatcgaagtcctcatcagctgagcccacccatgacaggcctgtcctggggcatttgaggtcctcaccacagagccaaaccagagaaggggctgctcctgacctctgacctcccaccaaccaaaggcttatctggggtcctcagatgggctgaatgcagagctgcctgggctgggctgatgcaaatattttaatgcaatttcatgcagatttccctttcagacgcaaattaggaatatttaccagtaaacaggcttttcttaggactgaggcacttttgcatttaggagaaaaccatctgtcaactaatgcatattagaataaaatagagtgacagtgcaggaaatgacaaaagatgcccactccccccagtacccacttcccccagtacccactcccccagtacccacttcctccagtacccgctccccccattacctgctgctgccagtacccactcgtcagtacccactccccccagtacccgcttcccccagtacccgctcccccagtacctgctcccagtacatggtcccccagtgcccactccattacccactctcccagtacatgcttcccccagtacccaacccccatacccactccccagtacccactcccccagtacccacttcccccagtacccgctcccccagtaactgctccattacctactccccccagtacccactccccaccatacccactcccccagtgcctgctcccccagtacctgctcccccagtactcgcttccccaagtacccactcccccagtacccgcttcacccagtacccgcttccccaatacctgctccacccagtatttgctccccccagtacctgctctccaccatacccactccccccagtactgccagagcccaccacatgcactgagtgggcaagagcccacacaggcaccaccgccccctgcctcccacccttggcagagcttcccatgtgctcttgggcttctggggtgagatgccacaggctccctgaaacgcacgctgtcttggggggtgtgagtgaatgtttctggagagacagaccctggtttttcttgggctcacggacggtctgagattgctggagtgttacaccccagtcactgcagcctggttctttaggctgagccggcactagggacaagccgtagcatgagatgtagggttcagtggtccccccaggcttctatccttggtgtgacccagcattaccatcaaacgcactgttaccttcgcaagctcagctcagtcaccttacccaaggaaccccgtgaactctgacacctcaggctttttagatccactgtccagagcctcaggagctgtgatctcttccttcagatactgctgaacccaccgctttcgctccattctgacaaacctacctctgaccacgtgagcttctcttcctcctgggagctgctcctccaagctcctgctccaggggccccgtcaggaacgtgtggccgtgctctctgccccaccagcccatcctgcgcccccccaccccccaacatccaatgccccttctcttgaatccccaaacacaggccctcatctaaaggccagcagtgattttaaacctttgtcatgtactggcctacgcgcagcaccatgccacgcagaatcttcacggatgtctgatgactttcgttactgtgagcgtttcccacagcaaccacggtcaatgggtgacgggggccgccatgtcccagatggtggctgctcccctcaggtccccacatttgctaatgtgtgtgtaaacgcctttcctttggttacatattttctctttatttaggttgtaaaaaatggtactaaaggtaaaatgagatagaactagacacacacattgttccaatatcaatctcctggttttgccataattggcttttataattacccagacgtaaccaccaggggaaaacctcactgggtaagggatacatgagacttctttgttataactttgcaattccctgtgaatctataatggtttcaaaataagaagtcagaaataatataaaaacttttggacaaaggaaaaaactcacttgcaattccactgagaaaaataaagtccaaagccccaactgacggaatgacctactcttgaccaagaggaccccagagaaaccttaaaactgagttgggaccgtgacaggatgaaggtcagacccgcctggttacccgcccccatcattaatcatcaccaggcttccttccctgggttcagacccgcctggttaccgcccccctctcaactaatcaccaccaggcttccttctctgagggctgaacagaaaccagcccttttaaaagactccattcctgatatccaccaagtgcctgaaactgctcttccttttatggtttcgacccaacaaccaatcagcattccctcctcataagagaccccattcacggagtgcctctggctagtctgtggaggctgcacagggagggccttcatgtcctcagcttcaccttttgatgcagaatgcctaactgtaatctgtttacatgttaagtctccatgccccagtgaacatgggatgcattttgcaaacattagctgaccatgcatgcccgtgtctccccttcacaaatattcacggctcctcccataacctgctgaatatgtatacttagccacccactcagcataaattcctgttccctttgcctctcactagaagtgcctgtttctggcttctggccggaggctacgcttcccagctggtcaggttggctgtcctgcaggatgcagctctttataaggaataaagctctcctttcccaattacgagcctcgtcattcttctgctgccaccatcaaccccataagagctgctctcttattcacctgttacgtacatgggcttctaacatctctgtgcacacacatgtttacacagctgcctttaagtttagagttctcaaaattttaaatgaaatcacagaatttgatttatttgattgttaatgatgagttaccttgctatagttttatattttaagtcagttttttttttttggtgaaggttttgtttttctgatttccttgctcgatggagtgtcttcttaggatacatttctcggagtttgattactgagccaaaggggaagagtttttgtttgttggtttgcagatgaccactgctgtcctgccttctaaagagttagactcattcaccctgcctaccatggagtgtacgtatatgagttttatcacatttggtctttatttataaaaccaaaactgttgttctcaagcaaccttcagtactaatcttaaaaataagacttcaggctgggcacggtggctcaggcttgtaatcccagcactttgggaggccaaggcaggcggatcatgaggtcaggacatcaaaaccatcctggctaacacggtgaaaccccgtctctactaaaaatacagaaaaattagctgaacatggtggcagaggcctgtagtcccagctactcgggaggctgaggcaggagaatggcgtgaacctgggaggcagagcttgcagtgagctgagattgcgccactgcactccagcctgggcgacagagcgagactgtgtctcaaacaacaacaacaaaataataggactttagacttaggatgtgattggaacatctacggatttctcaccccactgtagctctgacatttcacctgcccccagcaccacagggcctccggtctcacacaaatcattttggctggagagccctttgcaagtggtctgcttgccagctctccacctcacctgttggcatttcccaaatagcatttcttccagccaagagcctcatccatccacctggatccacctgaaacatttaatgtgcctgacaaaggcacggtcctgctgctgggcaccgcagagcaacaacagctgtcaccctgacaagcaggggcagctcctccccacctccccacctccccacctccttactccggctctcttcacctgtgggcaaaggcccccctctgtcccgtcctctcctgggtcacacctgggtgtgcagaaccaggcatctggtgaggcgggcaggaaatctgcatcttgacaagaccccagggagaaggtgcatggccatgtcgagccatcacagctgatatgttcctgctattgatttggccaaagtctgcattcaatgtccaggctcctcttggtaatccccaagcaaccgggtaggagctgtgtacagtagcaaacctctttgcacagacaggaaatgacagggtggaagtcagggggaaatgaagctggtttcgaacacatccgtcacccatctcagttctgcccactgcttgctccctgtgacaagtgctgagcatccccacaccccccgccccccaccccaggtaacaaacatcacacagcaaattcacattattcatggggcggattcccacagccccccaccccccatcccaggtaacacacacatcacacggcaaattcacattattcatggggtggattctcacacccccaccccccatcccaggtaacacatatcatggcaaattcacatttttcatggggtggatgcatgaccataggttcatagacttttaagggacttttgggatccacatattcttggctacagaatcctttcttggaacaaagtctcacccagaagcccagtgagcagcaggcaacagaagcctggaccttgctgagccggagtgtgagggtagcgtgagctgagcagggattcacacccaactgccttggagcccccagggctccttgaataaccatctgaagacctctgacctcatcccacactggacagagagaaggctccctcagcagagatggggggctctttgccacccagacagcccccagtctgagcagctcttcccctcagcttcttctcagattcctcttgttcacgctcctgagcctgcaggggctctgctgagactcagggtcggccacttctcactgacatgctgggcagggcacctctgtgtctatcacgacgcttagaagctagaacgctgggcaggggacctctgtgtctatcacgacgcttagaagctagaacgctgggcaggggacctctgtgtctatcacgatgcttagaagctagaacgctgggcaggggacctctctgctctatcatgatgctaagaagctagaacgcacccctaactctggacacaactgagaaggttggagccatggatctgcctttatccaaattatttttcttccaaacttttgagttttgctttttggtgattatcactttcctttggaaaaaaacatggctttattaatttgaataaaatgcaaatacttttcaagatatcagaaattagattttgaaatacatcaaaatgccacccatctatgaggggtgtgtatctgcactgtaatctgttcatttcctttaaattttgttttgagatatttccatttggcttaaaaggttttaattccactatctgtcatcacttgcattaaacgcaagcgcaggggagagatttagtaaatgctattagatttctgtaatcaaactctgctttatattccagagtcagggattagaagaattttaaatacattaaaaatcagaatcgtcaaattcaggcttaatactgaataaggcaattaaaattagaaaaaaaaatcattagctgttaaataatttatcaacttgtacccctttctcccattttcaccactgcaaatctactccaaatatataaacctcccgaaactacagcagtgaataaaacagacaaacccttccatcacagagctcccattccaggtgaagctggagatgcatccaggaataaggcccattgtttcctctgaaggcagaacccagccgtcacctgcattgctttctgcactcacttggggcaacaggagacacagatgctgggcttgagggccctctgggcacgatgtccgtggggtcaagagctcgagaagaaccatcttttgaaatgtaaaatggccacgtggagaaggataatgctccaggagctggtctccagcatttggtggaacgagaacaaagaaatgtctggagaaggccaggaagacaggcaggtcagggtgaatgagctccttgtggccagatcgtaaccagtgggtgaaataaacactctagcgtttggtaattttctgtcccagggatgacggagcctctgcccctgggaatggcaaggtccatcctctgctcgctcaggggccagagaggacacaggttggatgtggatggaagcagaggtgtggtgctgtgcaggtgagctcctgcctctgccctcagcccccacggtcccccgcagtctagggagaaccttccttcccacatatgagatgggtgggcatcaggagtgggcagaggccaattctttccagagttaaatagtccacttcacagataatctgagcagcaattcagatttccatgcattgaatcaatctacttcctagacagagcttcacaaggagcagtgatgccatttccattaagagataagaaaacctgacgggagaaacaggctgcggcaggaagatcaagagccctgcgtggcccactttaagtgtgaggctcctctacagatctcccaggagagaaaaggaggacacctgtggccatacacacctgttgctcggtgaatgggtcagggctggagacgtaggcttgggatcatcatcgaacagataacataaaaagccagggcccaggtgagttccccacaggagacagcaccggcagaaaggaggagggagccaggccctggagagtccaatctgtagaactcacggaggaggagctggtcgacttgaagggaacagagatggccgtcgcgcccagtgagagcagaaagcaatgcaggggacggctgggttctgccttcagaggaaacaatgggccttattcctcgatacacctccagcttcacctggaatgggagctcgtgatggaagggtttgtctgttttagtcactgctgtagtttcagttcttaaaacctgcctgacgcatataaatacctaggaatgaatgaacgaacagctcactaaactgaggctgagcagggaccctcgcacacgcacatcgaaatcccgcatgacgcatggcatcaactctgaggggcacaaagccgagagcacaggaagaaagtggatctccagactccaaaactgagaggagcaatcaaaaccgggcgtgactgggagctgctgctgaagtggctcctggacgtttggcatctttctgtggatccaagtgtgtggaagctgagagctggggtgtgagttcctgtggaagctgagagctggggtgtgagttcctgtggaagctgagagctggggtgtgagttcctgtggaagctgagagctggggtgtgagttcctgtggacgctgagagctggggtgtgagttcctgtggacgctgagagctggggtgtgagttcctgtggaagctgagagctggggtgtgagttcctgtggaagctgagagctggggtgtgagttcctgtggaagctgagagctggggtgtgagttcctgtggaagctgagagctggggtgtgagttcctgtggaagctgagagctggggtgtgagttcctatagtcacacgaggacagcccatgtggccttggggtggatggagatggggactccacatgaagcccaggaccttgaggacctgcctccctcaagattgaagcccaggaacagaccacctaccagctggggaagtggggagggggctgaaccccagatctgtgcatgtgccagagcacggtccacactttattgaatgaagcagaaactcccaggtgggcaattgacaggaaagtggatcggctgggacactgagggcagaacttcttatccagaaactctcacatagaaattcacacttcagtatcaccaatccctgctgagggtaagctcacaattctaaaaaaagacttcatcaaccacaaaagaggacccctcccccacaggagggggtcagcagatgtgatgagcaggagctgtagaaagcgaagactaggaaacggccagagggtctgaacgagaccataaaataagccagagggtctgaacaagaccataaaataagccagaggatctggacgagaccataaaataagccagaggatctggacgaaaccataaaataagccagagggtctggacgagaccataaaataagccagaggatctggacgagaccataaaataagccagaggatctggacgagaccataaaataagccagagggtctgaacgagtcaataaaataagccagagggtctgaacgagaccataaaataagccagaggatctggacgagaccataaaataagccagaggatctggacgagaccataaaataagtaggtttaaaatgattgaaaagataaaagaagatatcaaacacataatcaaagtagaaggcaaaataacagatttgataaattactaaataaaaatttttttctaagtgaaaaatacagtaaccaagagaaaagtacccagcatttgagttttacagcagattagacagaggaggaaggaacgtgggagacaatttcaggaaataatctgtcgtgtagcatcgagggagggagaggtgaaggcgcgacagagggtgctgagacagggtggatggaacaagaaggtccaaccctgcctaatcaaatgctgtggaggcgtcaggaccgtgatgggaatgagagtgaatgtttacgcgtgcccactcatccgcactctgccaccccagaaacctgcacacgacccagtggtgcgggtcctgggatgacccccatttgacaacacaggaagcagagtcacagggtgagcacagagactgcaggaggcccgcgtgaaagagatggcgaggggtagctctgcagagtcaagaaggggcctgagtgaaagggagcaccaagtatagcacaaaacccagaccccccgatccaagcagggagtgcctggacatcacaggtgcccaggggaggacgggaggagctgggaagatgaaacccagatcccccaatccaagcagggagtgcctggacatcacaggtgcccagcggaggacaggaggagctgggaagatgaaacccagatcccccaatccaagcagggagtgcctggacatcacaggtgcccagcagaggacaggaggagctgggaagatgaaacccagatcccctgatccaagcagggagtgcctggacattacaagtgcccagcagaggacaggaggagctgggaggctgaagccacagcgaccaggccctgtggctcctccagcgtgggaagagcagctctgtcctgaaagggtggccatggaggtgctgtcctccaggctcaggtgcgtgtgggaaggagctccgttgtgagtggggagccagggaggtgctgtcctccaggctcaggtgcgcgtgggaaggagctccgttgtgagtgggcagccggggaggtgctgtcccccatgctcacgtgtgcgtgggaaggagctccgttgtgagtgggcagccggggaggtgctgtcccccaggctcacgtgtgcgtgggaaggagctccgttgtgagtgggcagccggggaggtgctgtcccccaggctcacgtgtgcgtagacaacagcatctgaccttccatgcttaagaggcaacctgtggcaaggcacatggcagaagccacttgggctggagctgcccagtcagtggctccacctgtcaccatgtcctgcctcttttctggagtggccggagtccaggtttcaatgaggaaggtgtgtctggacaccaggcaccacacttgtcacctcccagatgaaccccagagtctcccattccccgtcccccacccttgcccctccagccctctcagggcagagcctccctcatgtccacaggacccacctccccacccaccacagccgcttctcacggggcctaaatattccacagtacagcagagggtcccagcctcgacgcgttctctgaccaggttacagagatggctctaacctgagtccatctagatttgtcccaaattcctggacaccattatccctctaggaatgacttagcaccaaccaccaccccacgtgatgagctcggaagggagaggaaagacaggaggacaccacagctccttgtacacgcaggagacgcacctccgacatcacatcttccacatgcaggagactcacggcccggtcacagccacccccggctgactccaccttgcaactacttggcccctccgcatcggtcactgcaccttccgtgggatgcaggtggctctcggcagcccccaagactcttggcttctttctcacccttcactgggtgctaaagagacagcaagctcccgggaaagaccagggcatcaccagctgcccaacacctcattcatccggcacgagccaggaaggcatcgagaaacaccaagaacaggagcacctgtccgggacgtgcacgccagtttccatcagtcgccggctgctctcctctcccacaccctgcccgtcatttaacccagacgcagccattttcaaagcccttcaggctattcttaagcaggctctgcatgggaagcgcaagaacctctgtttgggaagagcggccaattaagcagcttcttatttcaagagcccgagtctggggcctggtgaggacgagatttccccacagaagcagcttgtctttaagtggctccgcagagggcggctctgctgtgcagcgagcacactcataaataagcgctccttcacagttaattatctctaatggcgagcgctgtgaaacccgaaatctcgaacgcgggagcgcagattggcttcggtccacactgactgacgagtggccacacgccattcctcagaggaggcgcgtccgcgctctgtgtgcagttcattaagttgtcatgtcaggggacagcggccatcggcgcggtgcggggaggcgcctgcggctccagctgctggaggaggctggccgagcgcctctctgataccagcatggtaaggtttggacacacaggggcttgacagattttcagcgatattatggaagcattgcctctctgataccagcatggtaaggtttgcacacacaggggcttgatagattttcagtgatattatggaagcatttcctgttttatattgcctctcccaaatgtgcgtccttcgatattgaagatacaagtatgtcccactgagtcccaggaggaaagagtaatccctctagcccatattcattttcacacacttggcaactacaaaacagctgaagaaggaaggaagcacctattttctgaaggcttctccgttcttcttagccatgaatgctttttcttgtggggatactaaatcaggacttcaaaggccctaagacatcattgaactcgccaggcacgtttcgccaccgtttcccacccgcagaggatgctcctgctgcagcccactggtcctcccaggaaaacaggaccttggctgaattaacctgcaggtccagcctctgttctcacggtgttcgccagcacccagacagcactgcagatcgcagagcagacggcaccccttctgttactcaccgacccgactccggtttgaagaattttcagtccagaggtttcctccagtttgtctttgttgtcaactgttaggaaaaatcagaaagcacaagagtcaggttggagaggtcctcagtctccgggcacctctgagtattttcctccattgaaaatttcaattacatgactgcttgacccgcctaccttaatggaagggtcatgaacaggcacagaattagaacctgcacgaggccccattttcccactgacccagtgtgcgtccacctcgggccggcacaactgtgcgcttttggtttcatctagaaaggggtgtcccacccgggtccccaggactgctatgaatcactgatgagaaatatgtagagacattctgcaaactgcaacgtcttattttaaaattacgtaatcgtttctagctgtataattactgggaaatatgtttcattaaccagcattaggtgttgataaaagactccgtagaaggcaaagctgaatgtgtgtatttctgccatcagcaccgccagctattttgcagcctcttgttcatgccctgacaggaacatcctataataatttcgctccaataaaagcctcaccctggttttctcctgatgtagaatgaggaagactttcagagaatgaattgcactcgatggcaaaccaagggaaatgagctctggaaacaattagcagatggaaatgaaaccccagtaatcctagcaccaacacagcaaacccacctgccccacttcacagagaggacgggtgtcacaaggcaattgaccttggcttacgactctgtggaaatatgcgtttgcataaagcccttgtcactttggagatgaaaaccagaaaaaaatggaatttcactgcaaaccctatgaatgaagagtgccttgcaattgtgattaatacaggatgagatagcaggaaaatatcaattactctcaccccttattgtaacgcccctgtgttaatctggggtaatgaaattattcctttcggagagggacgcgatgagatcttgttacagcctgccctccctgctgttggggcctctccattgtcttatggaaagtttttccctttgagcaaatgcatactattttctacatataactaattacctactgcgctgaaagaacaagacagacagaaaacagtctgggctaaagcaaaactcctttaatactttatgatggggtagagccccaggggaggggaggacacaaatgtaagccttgggtggcaagagagctataaggccatcggtgctgctgtcctcccgcaaacagaggagacatctgacagattggcaagcttctctcaggagggtaatagtggactcttttaagcaggctgaggaacagaaagtgagtacaaatgcaaccttagaaccaccctggtcactgctgcagaacggtcaccgacgtcagggtcaggaatgaaaacggcagccccagcccatagtaatgagaaaaatccaatctgccggggagcgcccttttcctgtgaagggcaggtaacaactgggtcaggctcggcaggcccacggctctgtcgcagctactcagccctgccttgcagcgtggaggtagctgcagaccacgcctaagtggatggtcatggctgtgttccaacaaacctttatttacaacagcagacagtgggcctgacttgacctgcagactgtggttgccaagaggttgtctggctctagtccattctccacactgtgcccagggtgtcacgagcagtgagtctaagggtgtctgtccatccttgacctcaacatccagacctctggctccaaatccagacacttcggtggcccttcaaagcctttcaatggtgtcccctgcaggcatggagaacttgccttgctggccctgaggtccaggtggcactccttgcccagatattgggcttttcagcacatttcaggcattctccgtcccctgccaggatgctctgagctcctcagtctgacgaaaacgcagtcctcctcccaggaagctcaggccctacatgtgctcaggggcaccccctccctcaacatcctcagcacggccctctgtgtctcacagttcatggtgtgcaggctgcctgtcccctgcataacagaattgtaaattatggcactgggtaatttctgctctgtgtaaatgctcccatcacagttgactttagtgctcatgtgacactactaaagggaatggggagagatactgtcttagtccatttgtgttgctgtaaaggaacacccaaagctgggcaatttacaaggaaaagaggtttatttggctcacagtcctgcaggctgcacaagaagcatggcacaggtgtctgcatctgaggatgccccaggctgcttccacttgcagtggaaggtgaagggagccatgcagtgtgcagagctcacatggggagagaggaagcaggagagggcggagggagggccaggctcttgttaacaatcagctctcacaggagttaagagagcgagaagtcgctcacctccaccctgggagggcatgaatccattcacgagggatctgccccgccccatctgtccctcccccacatccaaagccctcccaccaggctgcacctccaacatggggaccaaatttcaacatgaggcatggcggggccgaaccaaccagatgcagagtcacacatggggaccgaatttcaacatgaggcatggcggggccgaaccaaccagatacagagttgcaggcgtgcggggaagagttcccaccatgcagacgtggaggacagaaataatctcaagggtgccgatgacagtaaaatgtagaaaaccagttataaaatggtgagctttagtatggatcgcctctgctcttaacatagtttatttaagtgcatgtttttatcattcaatgtttcacaatggctgtactgaataatgggctcacaaaattcctgagaaagtaaaattagttctactgagtggatgcaaactgtcccctgtgctggcacagtgctttgtttacacccgaagtggggccttcccgtccgtgtttcctgggtcctgaggtggggccttcccgtccgtgtttcctgggtcctgaggcggggccttcccgtccgtgtttcctgggtcctgaggcggggcctccccgtccgtgtttccttggttctgaagtgggaccttcccgtccgtgtttcctgggtcctgaggcggggccttcccgtccgtgtttcctgggtcctgaggcggggccttcccgtccgtgtttcctgggtcctgaggcggggccttcccgtccgtgtttccttggttctgaagtgggaccttcctgtccgtgtttccttggttctggagtgcacacttcccccagctgaagtggggtcgcagcacgggccagcacggtagtgactaggcaactcccgccaccctgaattggcagtgcagcaaggtgcatccttggaggccttggggagggaatgagtccttgtttgtacttaagcactttccactgggcctcctgtgaggccaggaacgcgctgcagcagaacttccggaaagggcgtcagctgcggccaatagtgactcagaggatgatcttgttggctgcagtggaacactcatgagaagtgtggtgccgccaaccctgcagtggcctggagagcacgtggggaccagccccgcggtggcctggagagtacgtggaaatcaacctcaccgtggcctcaagagcacgtggggaccagccccgcggtggcctggagagcacgtggggaccagccccgcggtggcctggagagtacgtggaaatcaacctcaccgtggcctcaagagcacgtggggaccagccccgtggtggcctggagagcacgtggggaccagccccgcggtggtctggagagtacgtggaaatcaacctcaccgtggcctcaagagcacgtggggaccagcattgtgctgtggaggcactcagtggaggggttccgagtgtgacgcgcgtcaggattctttaacccattgatcactaaaactccttttagatgccgatgcgagagtgaggctgataaacgagtctgagagagtttgttcaataaatacaagatcatctgaggtgattccaaagcacgtgctgtggttcaacggcaccgtctctgctcttcagtggacctgagctgagaaatggcttccaagtcagtgaaacaggcatcgtggtgagctcctagcagagctgcctcccaagctgattgtgagcctctccaggacaggcaaggttcttcagggtctatgactgcactttgatgcttaggggcctgtgttctttcttcaacaaatacatccacgttgctgcaaaggacacaatttggggccaccatcctaagcaaattaacgcaaaagcagaaagccacacgctgccacacactctcacacggaagcaggaaccagacatcatcagagagccacacgctgccacacactctcgcacggaagtgggaactacactcatcagagaaccacatgcgctcacatggaagtggggaccagacatcgggtacttacagccatagagatgggaacaacagacacgtaagagggaatgtgagagggaatgtgagagggaggtgggagaaaagggctgaaactccctctgggggacgtgctcactacctgcaagacgggagcaagcaagacggtaccccaaacctcagcatcaccagtatgcccaggtcacaagtgtaccccaaacctcagcaccaccagtatacccaggtcacaagcctgcacatgtactcccagattctaaaataaaagctgaaaattaaaaatacggataagtgaacagatgtgccaccgacaaccctcccacatgccccacggtgctgcctctcgaaactgactggaccttttaaaatgtagttcagtcggtttaaatcagcgattgaagcaaacaacctgaattagtgtttggttttttctttttccttttttttttttatactaaaaggttttaagagagtacaagggacagtttcattctcgagctaatctgagactgcagtgtaagtcaaaatcgaagtcacagagtaaaataattgaaaagtaatgaagctggcagtggctacattcctgccacacaccaagtgccggcgcaagcgcttcccacacttcaatccgtctccccatccaggctgtggatttccatgcacgcttcacaagcagctgtgaggaccacgtgggagcctctgagccagcatggcccaggtctcagcacacagcaagcgactaatccatgtgccctcgtgacagcggctgttttgctgcatgtctcatggccgggccactgtcacttcctaaggagaaagtgctgtatctgctgcgtgtctgagactccagtgtgctctggtctcttatgctattaactcgccgatcagtgcttctgcttgtgttttgaacatcaaacatcagctgaagcatcgctcaacgactttgctctgggtgactcagctatcaaggtcttcctcccacagtggaattgctgtgtgccccactaacagcacccacagcaataggataaaggtcaccaggattctcctgatttcttgtttcccaagatagggtctcttccttcccccacaggccggttccttcacaggaggagtcaggggctccgcaggccgcttctcagagcccatatgctcccggtgtcactgctcccctcccgtggccctgcacagggtctgctgagtgatgccctccagcactgtgctgggcactgacatccaacctgccagctcacgtcaagaaactccaccatcctctggaaagcccgacagtgccctgagcaggtgccggggagtctcacaaagcacagaatccgggtcccggagtccccagagtccagcttcttgccagggaaatctctttggagattgctgagtgcttttcgggggcgtctacgcgttcccttggcgctgtggaacgagccagtgtctgtggggcgtcagctgacttcacgcggccctgtgttccggccgctttcagcgatgcctgtccttgctagttcactttctggctttgagatttctcactggcagagagaatcgaaacacagagaggcccgcacctccctcctcctgcatcgcgaacgctgcacaagggcagcctccagggcacaagggcagcctccgcagcacagccctgcggtttgttgcttcagatttttttttaacctcaaatatgcctaaaaggaaaaacaatgcctcgtggtccccggcatcctgtgggtctcagggcacccccgacacctcccgacattattcctgcacccttgatgctccgccggatttctctaaatggccgcgtggattcccttttccacactgttggtggaattgtgacaggtgctgagctctgatcctgacacgtctgcactggggagcccgccgtcctctcgcgggacttttgcccacacctgtgtaactgaggactcacacctactccttttaagtctaaagtaaatacctgctgattctcagtgtccttttgttcctttttatgaactccatgacaatactgccaatttttaagtctctgctgaacatgttgaaggaggaaaagaagaaaaagcctgcttcagccagatgtccatcaaatgccaggtctgagttatgttttgagccaagctctgggcctcccaagtctgtcaggccagggcgtggagacagttggagaagctgccttaataaaggcacagaataacagagaaagcccgtttttatcttcatgggagacaaaaagggtttccaaacacaaaaaagaagtcctttaaaattaaattcactagatgaaggatatgcaaattacctgaagaagcggaaccctataatgttctcaaaattctgcaatagcctatttaattagtattttaatttatcagactaattctttgcacttgacaatttatgcagcattccatataattaagcaggcagctacagtggaataattttgcctactctctttatcctcgttattttaacctgaaagaatgtgcagaagtctcttctgtaatctaaattacaatggggatcacttaatggctttgctccattagaaggtgggaggggagggagagcacccaggcccggggtgaagctgtcacctggagcctggccagctttctggacggcaccactggcttccttaggaaggatcctcctcccttatggggtggagcctggtttctggccgagctgaaacgacgtcccctagggtaagacctgcatcctgtgcctcacagccaccgtaaacaagctgcctcaacgctgccactttccacccagggcccccgtgcagggggtcagcatctccgggtaatttggggacctctgtggactctgcccctgccctgaggtcagccttcctgaaactggaagccactggtcaggattccccgtgcatgtcagcaaggtgcccagccgagggctttccttaaagcggaagtcattcctgggaagaggaaggggaaagagctttgaaggaagttgattcagtgattggagctctggtcccaaccggcacctcctttcctttttgggcatcccagggtggccacagagccactgggagtgcagaggcctcctgggcccaggcgagctgccgtgtcgccgactaacatgaggcccacctggtcgcagggctgatcacaattcctgtaaaggaatcttttaaaaattagcaatgtccatactttcctatttcagcccattctctttccccatgtcgttttctgaaaagaactctagcagggccatacgtgaggcccatgaggggccccaccttccctcggagtggacaatcccggactgggctctcccagtggtaataggtattctatgaaaaaatggggtctttattcatacaaggttaagaaatagcctgccagtcactcaggccaaacctaaaactcctaaaaaaaaaaaggtttaaacattgcaaaccttcttaaagcttctcactcactactgtgcactgtgagcctttcactcaccctctgggcgctggggcacacgctgttctcccaggaccacgggcggtgtggaggatgggctaggggctgagggagaccttagggaggggcagggtaggaaggacccacgtgtcctgagcccctctagactgggggctcgccagggtctgaagcttcctggagaaggccctgctctaagcttctttggttctgggacctctaacatgtcttaacatcaaacacgtgcagtgacacttcagtcttcatttcagaaccaaagactctcactcagcaaatcctgagatcccgagatcctgacaccctgacacctgttggaaaggtttggaagcagccatggaagctgtcaccagtgttttatgctcagatctgtgctgatgtcacactttggacagccaagggggcgggaagatgaagcataaaaccaccttcaaggtgggtgtggtggcatctggggtaccccgtgaccgagcagtgtggcccgagggtgagaacgtgggctcggagaggaccaggccacagctctgtgcggccactggccagctgggcaccacgggaacatttacccctgtgtgtggtgtgtcctgcgtggcagtatctccttgtcccgtgtgtggggtgtcccgggcggtggtgtctccctgtcccctgcgtgtggggtgtcccgggtggcagtatctccctgtcccctgcatgtggggtgtcccgggtggcagtatctccttgtcctctgcgtgtggggtgtcccgggtggcagtatctccctgtcccctgcgtgtggggtgtcctgggtggcagtatctccctgtcccttgcgtgtggggtgtcctgggtggcagtatctccctgtctcctgtgtgtgaggtgtcccgggtggcagtatctccctgtcccctgcatgtggggtgtcctgggggtggcagtatctccctgtcccctgcgtgtggggtgtcctgggggtggcagtatctccctgtcccttgcgtgtggggtgtcctgggtggcagtatctccctgtccgctgcgtgtggggtgtcccgggctgggcctcaggcttctcttttccaccctcttctgcccccatgtgctgtgttcagtcctcaggccctgactggcatctgttcactgatcagagccattttctttcctccagccccatcctttctgtggatctgatatcccacctgtcttcttgccacttccactaggacgtccaatggtgtctccacccaaattcctgacctcaccgacttccccaagcctgtctgtcccccgtgaccccagcctgccaggagctcaggcccacagccgcagagccgcctttattctcctcggacacagcacagcgcgcctggtgaggctgcaggttctggcctcagggtgcacatgggaccggccggcgtctccgcgtggccaggtgcgtccagcatctcattctctgctctggatcttgcagagaccccaactgcgctgcctggctcttccatccatggtgccgggcccggcctgggaggggctgcacaggccgagccgcagcatgatgtcccctgcgcccagcacttctgccatgcgagccttgaaagggcctccacccctgcagcctgcattctgtggaagccacgtgttgcgtgaggcctttcatgcctgggagagggaggtttgaagagcagaagcacttaggcaggagaaaagacaaattaatgaacgtgtcaaatcctgctgttcaggttacagaaaagccaatgatttctgcataaagaagtatccgttcctggcagtgccaggtgcccactcttgcgtttctttgcacgtcggctcacagctctagaagtactcacggacaaatgtggaggcgccccgcagcaccccacaatccctttcacttttccacgtctgtcgagacaggacatgcatgactcacgcaaccagctcatgacatcagcaactgcagggatctcagagccagaattgcaaatgtcttattcttacaaaaatatggactacaatttgattaaattgtcacaaaatacaatttaaaatacagctctatttaaatacttttgattgaaaattttgatattttgtgaattatatttggctttagaattttaataattcacattaaatctttttgaagaaaaatagcttttgaagcatagttttagtttacaattttaagtgcatttttatttttaatgaaaatacttctacatcttgtaccctgtgtgcaattacagttgaatcatttctgtctaaaacaccccaactttatgaagatcgtcattaaacaatctaattagtgacttcatgaaacaaggggaataaaatgcatttacaaataaatatacaataatttacaaaattatgtatgtcattaatttattactcagccaaaccttaccagcccatcgagagaacatcactactcacaggattataatccaatccactgtctttttcattggattaattttcagaaataaaaacaatagctttatgcacatttgaataatttttttcactatgaacatatatttttcaaagtatgaagcatttttttagcggctaatgagcttcacatagacttttaaatgtccagaagcccagcatggaatgccacttgccctctggccttgggcccctcgacagctggacaggggctgactctatacactgggggggggaggatgctggccactcaacacacactcaagcctctcctcaaagccctgcgctggcgcatctcacccacagtgaggtctacagtccaggccacagacacaaggcccttcagaacctggcccttggctgctgccctgacatcacctccaacagccccctcgcccctgctcagccccttcagcgcgggacgccccggccagctcctgcctcagggcctttgtacctgctgtttgttcctgaccctcaaatgcctgcctgcagccatctgcatggtcctcctgttctcacccaacatcgggccctcatcccatcacctgtctgtgccctcatccagcttcattctttcccaaaacatttatcaccctctgacatgatgcatgcttggttattatctattttttctctagaatatcagttccacaaagcgaggatttgccctagtgcttagaacactgtccagcacattagaggacctcaacgattatctgttgagggaatgaataagtgacttataggaagcatgagcaaattaactccctagtggcagcgttaaagcattactatctctaggatgatcatgccaccactgttacctctattactaagaccagtggtggcactcactagtggtgcagggagggagtttcctataccttccacacccacagttctagttttgaactaaagagccaacgataaaaggatatctgaggattcctgatttgcagtctcatgattctcttccaataccggctgccagccatgagcacgggtgcaggatcacgcatgtacgccgtgggaatgcgtgcaggatcacgcacgtacaccgtgggaacgggcgcaggatcacgcacgtacaccgtgggaacgggtgcaggaccacgcacgtacgccggatcacgcacgtacgccgtggggacgggtccaggatcacgcacgtacgccgtgggaacgggtccaggatcaggcacgtacgccggatcacgcacgtacgccgtggggacgggtccaggatcacgcacgtacgccgtgggaacgggtccaggatcaggcacgtacgccggatcacgcacgtacgccgtggggacgggtccaggatcacgcatgtacgccgtgggaacgggtccaggatcacgcacgtacgccgtaggaacgggcgcagaatcacacacgtacaccgttctgcacagctggcggacgcttcctctttcccacatggtgtggtgtaacctgatcgtttgtatgcaaagcaaacccatgcacagctgactgtgtcaaaacacagccagaaagatgccatgcggcagggcacgtgtgtgtgtgtgtgtgtgcgagcgcgcgtgcgcccctgcgatcagcccagcagacagagcacgttcctgtaacgtgttgtgatccactgcgcggcaacaacacaaaacacaagaaaatgttttgatgttaatcattttacatcaagtcatctgaaagtagcatgttgccccaatgtttggatgtttaattttgctaactgtcagaaggaattaaaataaccctggaacataactgctttcctgacaattatttactaaaaccagagatgccatttaaagcttaattcccagagagggagaagagaaggggggtgcccttgcctgtgcctgtgctggaagtgggctgttcatcatctctcttttcttctttggcggtgaggccaaaggcactgtggcacagcaagccaagaagaggctatccatgaagatcggtctccgtgctatcgtgaacgggggctgatgcctgaccacccgaaggaagagaggaggcaagatgctgtgcccacaagacccaccccatggagaaacgtctgcatggtgactgggcttgcaatgcggtgatctccaggatgaaaagatgcccccttagagatttaccacgatgcaaagacgctcatttctacctgaacagccagggtcccatcctgcttagtatagaaatagcaaagacgtttagggagataaactagatgtgcacctactgacatgtgtataacgttcagtgttttattaaacatgtatatatcacgggctcctggaaatgattcctctcaccaactcagatgactttctcttgaaagttagaagttttggggttaatttgtaattcaaaaatattaatattttatatttatattccattaaatattaggaagataccaaagaatattataaaatatgtgttggttccaaagaataataagacagcaaacatccaggatacctgacactctgaaaagagataaaacattaaaattatctttgatactctctgtgagctcttctcggtcctatcaaagctaataactttcatgaattctgggtgcatagtttctgtatgtagactttttttttcacctatgtgtgtatccctaaacaaaatactgcataagatgacataataacatacacgttctgtgatgtgccttccgtcttctgctaaccctgtgttctgagactcagattcggttttgcatgtcatggtggctcatgcattttcattgctgtgtgactgcattctatacacatggagcatcacgctttatttttccaatcacttacccagtccggtgggaaactgggttcttatttttccctccatatctgaaacagtatagccatgaaccttctcacacgtgtctccaggcccatgtagagaattttctccagtacaatcactaagacatagatgtcccaaagggattctatcaatttacactcctgtcaccaacacacagagttcctagtgctccgtgtgctcattggtttaagctttaaacactttgccgatttggtagatttacgttgtatctccttgggcttccaatgtgcatgtctttgataattcatcagtttgtgcatcttcgtgtatgtttattcatcattcatgcttcctcttacatgaaatttttgttttgcccatttttctactgggttatttgtctttttcttactgctttgtagaagttcttcaaacattctggataccaaaactttgtcagttatgtgggctgcaactatcatatctcagtttgtggcttggcttcttaaagttcctggttttaatacagtctaatttatcattttctttaaggtttgcatttctggcatcttgtttaaaaaattctcctttagctcaagatctaaagatatctatataaagatatctatataaagatacaactctgtttttttcctaaaagatttttgtccttcacatgtaagtctgatattgaagaactgatttttgtatgtgattcaaggtagaggtcatttcatttttttctcattgaataccccatttccccatcaaagtttcttgtaaaggccatccttcccactgatctgtaatgtcaaccctgttatcaatcagttctatttaagggtctactcctgggttccctctgttcctggcccaggtgtctctccgtgcacagatccatgtgatctttcttactttagtgtaagtagtttatgctgtctacacacgaaggcaggtgttggctctttgtacttatacattttggaatcagcttgtcacgtttgtaaatgaatagtttttggatttttgttaaaattttattgaatctagaagtttgattgttattaatagcatcattattcccaatctgtgaacatgtaaatctctccatttattgtcttcaacatcttttaagttttatatttttccccataaaagtcttatatatttaacatatgtatatattcccgggactttaaattttgatgctattttaaatgagtatcatttttaaacagcattttctaactttttttcctaaatatacaaatacagctgacttttgcatgatttcatatacagcacccttcctaaactatctaattccattagtttacctggatcttcttctgtctcttctgagtaaataatgaggccgtctgtgaataatgacaggcttgctccttctctcctaagtgcaccctttatctctccttcctgcttcactgcctgctgaacggatcctcctacaaatgcttgtaagggtgagagcccacatccctgtcttatttctggtgttcaagagaatatttccagtgttttgctgggaagcatgatgtttctgtagggtctttaaaaaatcaaaataagaacaaactagtcttactttattcaacatttttattatgaatgaatgttaatatttagcaaatgtttttacctgtatctattgagataataatttttttctcttttcattaatgtgatagactacattaattacagctttaattgctcatgacattttttaaaaataaattgctggattttaatttgctattatttggcttttacacctatgtttttgaggaaatttctctctaattgtcattccctgtactgtaattactgagttttggtatcaagtttatgctaacctcatgagctgtgtagtctgggatgttttgtgtatgagtgcatgtgtttggatgtatggaataacttgcttataaaatatgtgggcctgatattttctttgtgggaagacttttaactattaactcaagttcttccttggctacagggctattggagtttttcattctggtattttggtcatgttatctaacatttcaaatatatggccataaattgttcatgatgaccccttgttattcttttatatgccaaagcatctatattagcattccaattttaattctcaatattgtttatgattccctcctctcttttttaaaatcacttatgacaaaggaggtttctcaattttgtaagctttttttaaaaagacaaaaaattttgctttttaaacaaacagagagattctctgtctttgagattctccaacttcactgtcaggaatcgaggtgtagagcctttttcactccataggcttctggaatctgagtactggtgtcttacatcagtggtggaaatttttctgccactgtatcttcaaatattacttctggagtgctctgctggaatgcttatgaaccatatgtaagattccaactctgccagaatacttatgaatcgtaggtaatattctaactctgctggaacactcatggatcatgtgtaagatgtgtaagatgatcctcgatggtgatagagtgtgcctcttccccggcaatggctttcccaataaagttggctctcaatgtagctaccttttttttttttaaattagtatttccttaggaactccataggcttctggaatgcttatgaaccgtgtgtaagagtcttctactctgctggaacacttatgaatcgtgtgtaagagttgcctaatctgctaaaatgcttatgaactgcatttaagatcctcctactctactgcaagacttatgcattgtaggtaagattctcctactctgccctctatggctcctacccttactttcatattttcaatttatttgtctctgtgggctgcgttttagaaaatttcttagttctatactttacttctctaattctctcttcaactatatctaatctgctattaaactcatacccttagtttagaatttctattattatatctttcattaaaatatatttcttcaaaaattgtggtctcttttaagactattgatctgtaggttatatttagcttcctcctatgttcctttaatcatattaaaatatttaaatttatgatctatgtccaatagttacaatatctgaggctttcttttgttgtccattctttcaattaacttttgtcctgttacctggtatgttttaaaattttttattgtggactcaaatttcttggaattttacttgcaggtattctttatgagtagaaggggaaagaaaggattcctccagagaggatctgcctttccctctgccaggcatctggaggcccgtgcacctgggagcgtttgaagctgaattccctgcttgagatgttgtggctgtccaggcagcatgcagtgggattgtacatccctgtgaagcttggctgtggttaatgtcctaagggaaaatgccacccccccacccccgccttccccgccacacacacacacatccaggaacagcgctgaacgcaagcagtttaccatcctccagcccaatggagagctgagaagacactctatcatcggtcaccattaccctgcagtcatggttcttgggggtcccagctccatgtggcatgtcttctattagccttaccatatcaggatttcctagtgcctcctgccctctatagaccacaagatcatgaatgctgaagttcaggtttacccggtgtggagaagattctcagaataaaggccaacatcagtcatccactgatgtccccgggttcctgctctcacttggcttgggatctccaataatttaattattgccagatgtctgatgtgttaaaattatctctatgtcctcatattctcgtagttttgtttttggaatgagggtgagtcccaatatttgtttcttccagcgtaccagcagaaatgggaactcccacatctcctaagaaatctctgccccgccccagctgctttgtgcttatgaagtaaaactcattttaattcaggtttgggcaaaacctcaggggaggctaaatatgaaataatctaatgattttatattatgctaaatataactaaacacagatgtgtatataaaattgctaattattcagtgttttatggaatctgccgtgactcttgctgggactgtgaactagaaatggcaacgacaccttttctttgtgtggtgctgcgtgtggacgctggtctctcctcggccccagtccacgctttccccaggttcttcatctctaaccctcctggcagcagtgctgggtcagagggtctcaccccaaatggtcccaggctcctgtgcagggcctggtggttatggtcccagatgggcggctggagcctctgggaggtgttggcccagggctactcagttcaaaatgggggctctgggaaggagagccaggtctctcgagcttgaggtggctcctcatggactgtgaaggggtgcatgttttaacacaacaaactgctctcctctaattacctgtaatccataagacagtgtgaggacagttctgggagcaggtgagttcgagaagcaccaagacgcatcatttgcctgtcctgtgtgtggtctaagaggtgcctggtgcttcactgcagagcacgcagctccttgctccagccacctgcaccacaagcactgcttctgatgtcataagcgtggcctcgaggagatgcttaggagcccccaggccagtgcacgtcccctccccggctgaaggtccccaccatggcaggggctggccacgcaccccggccactccgggacacgtccaacacacgtccccctccccagctgaaggtccccaccatggcaggggctggccacgcaccccggccactccaggacacgtccaacacacatctccctccccagctgaaggtccccaccatggcaggggctggccacgcaccccggccactccgggacacgtccaacacacgtccccctccccagctgaaggtccccaccatggcaggggctggccacgcaccccggccactccgggacacgtccaatacacgtccccctccccagctgaaggtccccaccatggcaggggctggccatgcaccccggccactccaggacacgtccaacacacgtcctcctccctggctgaaggtccccaccacggcaggggctggccacgcaccccggccactccaggacaggctgccgcagctggggagcttctggttccccttctttgctgttgcaaaccgctctctctcattttaaaatgtcctgtatgaagcgaaggcactgaacacactccagcctgcaacgcagaagtgcacattggcgtggagcatttgaaaggcattttctccttggaaactgaaaggtcaatttgtcaaactccactcctcagggttccaagaaaggttcttcagcccttgttttccagccataacagggtaaataaatgagactctcatctgcgggtctcctgtggattctgccggggggcggggcttcggtggaaagggagcatggctgcgcagtaataatagcggcaggctgggaaaagctaatgtcagctccaatttccaagtcatttttcaaattattttaattagatattgtttcaatctcacttacattaatttaatatctgatatcaacatttcagttttcaattgttcaaatgattttttttcagtctgcctggttgcctggagtaatttaaaatacaatgtttatcttcagcaattttcaacgcgtggtcctggacaaactgctatgttcaataaaagtgacaaggaagggacggccccaggtcctgcgtggcgacgaggaaaaatggaaattgtctccttattgttcatctctagacatcagagtcagcaggccgagctggggctggggctgggataataagattttccacccatttcacgatgtaattggctttcccaacgcaaatttcagtgaaatttgactaagatttttttgtattaaaaggcatctgaataaatggccacattcccccatctacacattttctgagaattttcagtcacagccctcaaacctacccctaaaagattcttcctggacgcactgccacaaatagccttaggttctgcgttttcttagtttgtccttttcttcagacattagcacggatgctggtaaagacgtgccttctgaaatggtaaatgtaaagctgaaccaggccttcacctccccgtttataaaatgtgggagaaatgaggtatcctgaagtgttcttctaagacaaggaaattagtattgttcttgaagttgataatgagaaatctgaagatccttactgcttttgaaaagtgtgaagaacttaaaacaaattacctgggaacaacataaaaccaaactataacatcatccacatggcaacaggtaaaccatcgaaggaacaggagggaagctgaggagctggaaggcgtgggccggtgtgattaacgagaaacacacacagtgaggacgacgcgtgggagcaggggaagtcatcttcctaggacaggtgccttcactcgcatcaaactactcattatctacaagcaacatatcgaaaacaacgccgtccagaaagattacaaactgacgcggccgggaaaatctatcagacatacgaatggaaggagagaaggcgtcatggcgtcgacaccaagaaaatgtgcaatttgtttaaaagttattgattaaagtggaataaatagactaatgttagattagattataaaattccagacaacgatatagggttaatgaactggtgtgtgccaagaaataaacatcgaaattaataaggaagaagtgatcacagtacaaagagatgccactcgcagcctgagggacggaagggcctgacggcggccatcctccaccagccacgttccggggctgcgcttggcactttaactgcacccggcactaacccccacaacagccacctgaggtgcggactttaaatgcccccatcttattgataaagaggactgagttttccagggggttaagcaacttacctaaagtcacagggctagtaaaacacagagccttattagaaacaagtctccctagctcccacaagggtcctacagcgggcccgagaacatgacaaagagaattcaatagcgactgatcaagctctatggtctagaaaccagaatggaaccgatcagatattaagcctcaaaaaaggacttcatgttttttaaatcataaaaatcataaatgttgcattctctaagcaaaatctaataaattagaaattaataaacacagaaaacaaaactctctcatcatttgggtattaaaaatattattttcaataattcttaggttaagaaggaaatggaaactaaattacaaaatagttagagaataataaaggctgtgggagataccgaaatgattccccggaggtgggtttcgaatactgagagcttccatgatgataagagagaaggacagtaaacaaagtaggcactccatttatgacgtcaaagtaaataggtaacaaaaaacttgagggaagaaattaagtaataaaaatataaattaaactataaaagggaatacaggattggtgaataaacccaagagcttgattttaggggaaaaaatcataaactcttagaggtaatcaagaaaagtaaaacacctcaaattctaaaattatcaaaaattaataattaggaggacacataatcacagatgcagtggaaatttaagacttataagcccttaagaccatttatatatctatttatagtcatgcaccacgtactaacgttttggtcagtgatgaaccacatacacccacaagtggtggtcccataagagtatgacggagctgacaaattcctgtcaccttgcgacgtcacagccatcgtaaagccacagtgcaaagcattaccttttctatgtgcaaatgatacacaaatgcctaccgctgtgttacacctgcctacagtattagtatagtaacatgttgtgcaggtttgtagcctagcagcgctgtcccatacaacctgggtgtgtaggaggctgtagcatctacaggttttgtaagtgcaccctgtgatgctcgcacaacgacgaaattgccagatgaaacatttatctgaaggcagcctcgtcattaagcaacgcatcgctgtctaagaatttggaactccaagaaattgaactatgaacaaagaaaataaaaattactaacctggctaagaatgaagaaagaaatattaatagatgaatatgaaaatacaaaacgtttttcaaagaaacttccttccagaaaagcacaaggccctaagtgtgactggaaagttctctcaaaactttgaggaataaaagattctcaagtcagcacctcccaggagcgccagcaccaagcgcagttcacagtttacaaggacacgcttggcaatccattggtgggtctgaggatacagcaaaggctctgagcctacaccaaggccccccatgttgtctgaacgtcctgcctgcttcttcttttgaacatgaagttctagccagcgaggacaaatgctgagatgtttgagacttcccaaaccacttgtgttttatcaatacattttataagccaaaagttaagagtcagccgcacaaacagagctgcccaatccttggcaaagcagcaagggaactcaatggggaagggaccagcttttcagcagatggtgctggaccaatgggatactcacatgcaaaaagtgaatccagacatcaaccctataccctccacagaaattaatgcaaagttagatgtaaaatgccaaactatacaacttctagaagatacaaagaaaatctaggtgaccttgggtttggtgatgactttttagagatacaacaccaaaagcacagttcatgaaaaaaacaactgataggcaggacttcatgaaaattaaaaactgaatatattattagtatatgacccagcagtcatgccctttggtatttgctaaatagagttgaaaacttatgtccatacaaaaatatgcacatggatgtttattgcagcttagttcataattgcccaaacttggaagcaaccatgatgtccttcagtagatgaatggatcaaccgtggtgtatccatataataggatatcattcagggctaaaacggaatgagccgtcaaaccatgacacagggcttgcaggaaccttaaatgcctcttgctaagtgaaagaagccatcctggaaaggctacacactgcatgattccaacgctaagacgttctggaaaagaacaaaggatggagacagtgtaagttgtggtggaggtaatgaggagttgggggaagagagaggtaccagcagagcacagaggctttcatgacagggaaaccactctgtttgatgctatgatgatggatacgtgtcatcatacacttgcccaaacccacagaatgtaccatcctgctgtggctcaaatatggtttataccatctgaaactcatgctgaaatttgattaccattgtggcagtgttggaggtggggcctttaagaggtgattaggtcattaagagggactgatggtttcttgcaggagtgtgataattcttgtgggagtgggctgccgcaggcagggagggctgctgtaaggcgagcccagcccctcatgcttgtcgtctcattatacatgctcattggcccttcttccagggcatggcgcagtaagaaagcccttgtcagagctgctgccatgccctcggacttcccagcctccacaactgtgagctaaataaacttcttttcttataaactaccctgtctcaggaattttattatagcaacaaaaatccacctaagagaacagcaggagtgaaccctgatgtaaaccatggaatgaatgtgggctcatcaactgtgacaaacagaccatcctaatacagatgggagcaatggagagacggggcgtggagtggaaggcagggcacgtgggaaccctctggactgtctgctctatttttctgtaaatgtaaaactgcactaaacataaaatctactaaacacaagtcacaaacaaaggttaaaagttgcttgtttttatttgaagtgcagatgtccctggttagatgttcaaataccttaaaaactgtaggtaaagggcattctccatgtgtacaaagattattactgcagtgaaactttcaggagaattttgaagagagatgattattttctgactctactgaccaggattctgttcaacatcttcatacgggatttttggtttttaaatactgggtgacggggccaaggagtggtgacttgcagaaggaagtctttcctgggcgatggggccagcactgcatcctgacttggaacagagtgcgtggaaagggaaatgggggtctgggtctcagtcctgcagtcctgcagtcctacagtgggtgagaccacacctgcggcaaagctggaattgcactgaaattggaattgaattgaaaattatgcagaattggaattgcattgaaaattatggatggaaaacaagagcaaacttaccactgctaagtgctgatttaaacaagataaatgttctctttagttggacacaaactagcaagaatgactttgttcccatgggtttctcaatataagctccttttgctgggaaggaaaaagggcatctgcagtaaggttggttcttttccttccacatcaccagcggcaatcgtctttattattcattagcaagctcgatgtcacggcacgctgcggcaccgctgaaaccagcctgagttgggaaaatactttcaatatttcaactgactgctttctaagtcacaaataacacagctaatcctgaggtcactcgcttacaaaaacctatttgctgtgcttcagagcaaaatgaaaatatatattacaaatgatgccaccagtggcaagcctgctctgggaccagccatccttccactgtctcctaccactggcagctaaaaacatccctccttctccttaaagccattttaataaagaccccagaggctgtttactcaggtgaacacatttatttgtaaccagtgtttaatgtaaaatttagcctaggctgtgtgtgtcaataaaggtctataaataaaacatcactctgggttttttatctttatcccaacaccctacactgcatgcttttagagacgccgttccactgggcctttttattcttaaccctgacctataaaaatcacttaagtcaccagaagcttttcctatgagccagtcagtgcaggtgaggtgggagcagctagccataagttatgatgcttgtgactgagaaaacaacaggtgggtgtgttctggcagggcaagaaggcagccagccccctgggaccatccaaccatgctccacctgcctgagcctcgggaaacgccacctgcgcgctggcctgtggaggggagctctttcccctcgcgaggcagagcacatgtcactacatcacattgagttggaaaaatccaaagaacatcatccccgtctttccacctgtgtcagttccttcaaagacaggcccgagacctcctttggaagactttgctcaaattatttgggggcaaacgtccaaatgtcagaccattgatggcttccatcccattccctcaactgacggataaaaccccagaaactcagagaggctgtcactgctgcaaatggtccaggaagaaactctgatcccagaaaccaacaagaggaaattttcctgagataaagagaaatctctgcctttagataagaaatgtgttttcaggaatcgacagtgttagtgtaggatgttagcggtcacacccgagatggttcttttgctaaactcagggagattttagttgaatttgcaaaatggttgctaacatatctacctgttcctgagcagaatttaaaaaagcaacctgtcctgaattagaggaggctggctttggtgtgctgtttgggttggaccgtatctcagcactgtgttccattctggataccgctgtttgggagaccccatgggcacccatagcagacggcagggatgggacaatgggggatggcaaggttgtgtgtcacgctggggagctggaggagggggcccggtcctgagtgtttcagaaggcagggtggggccatcacatccatggcctcttcacttggacaggatgagggggcgcggccacaggcaggtagaggggtggcagaggaggtctatgtggcttcctggggctggctccattgaagccacactcgttctccttttctcctccacctgtaaggaaacactgtccattggaacatcagaaagggcggccctgggctcaaagctgaggacgccccctctgacctgcagctggcgaggtgcacagcccctggaggagaaccgaggccaccagccctgttgccagagctcagctgctcctcccgacactggttctgagtcatggaatctccctaccctggacgcctccaaaggccccatccacagggccctgctcaccactggcccaggtgccacccagagtcagagctggttcctgacctctgccagggatagcaattcccattcttgagctggaaaacaggtcatgtggaatctacaggatgcacggggaggacacctcgctttatttcaggtacacagggtaagaagtccgctgcaggtggattaaagacttgccgagtcagccaggaggccactgcctatgccacttggcacggtaccctctgctcacccaactcccatgactgagatgcacagttctcaccagctttaggtgatgaaaacacctccactgaagctcaaacaggcaaatgcagttattgaaatgtagtcaggatgcaggcacctgcatttagcacgtcaggcaaatgcagttattgaaatgtagtcaggatgcaggcacctgcatttagcacgtcaggcaaatgcagttattgaaatgtagtcaggatgcaggcacctgcatttagcacatcaggcaaatgcagttattgaaatgtagtcaggatgcaggcacctgcatttagcacgtcaggcaaatgcagttattgaaatgtagtcaggatgcaggcacctgcatttagcacgtcaagcaaatgcagttattgaagtgtagtcaggatgcacctgcatttagcacgtcaggcaaatgcagttattgaaatgtagtcaggatgcaggcacctgcatttagcacgtcaggcaaatgcagttattgaaatgtagtcaggatgcaggcacctgcatttagcacgtcaggcaaatgcagttattgaaatgtagtcaggatgcaggcacctgcgtttagcacgtcaggcaaatgcagttattgatatgtagtcaggatgcaggcacctgcatttagcacgttgctttagtaggttaaatcccctccagaatcttccagaatccccaaaatctaaatgcccacatttgctacgtccaaatcacggctgtcacaatagcccttcatgggttcaccttcctcgtggtcccgggtcccaacctggcctggcccctctccctccagcttcctttggctgcaggcaaacactgcctgttctgaggtggtcagcagtggactcggtcaggccacgtggaaaccgcatggggccacagagtgatgggcctcagatgggcagcacacccaggagccgctggggaccctgttaaaatgcagaccctgatgcagaaggtccagctgttcaagccagcttgcaggtgaacccagagctgtgggtcagggtcagtcctagagacgcgtcacagagaaacgacgctgaatcaccagccaccgagacaatcaggaaccagtgacgtgatggtaaacagaggaaaacacgggccactcttcaaagcgcggtgcctcagaaaacacttccacagacacctcttcttctgtgtcgttctaaaacccttctcccagagataaggaaactagttccctgcaaaatatattttatggttttgttatcattttcagtatttgcactgtaattatggaaaattagtttagactttattaagcttttgagtctacatgtgaggcgaatggatgaatttaatttttatccatgcattacctccctctgtctatctaccactaaaccacagccacaggaagctgagggtccacgcgttacctccctctatctgtccactgataaaccacagccacaggaagctgagggtccatgcattacctccctctatctatctaccactaaaccagagccacagtatgctgagggtccacgcattacatccttccatctatccaccactaaaccacagccacagtacactgagggtccatgcgtcacgtccctctgtctgtccaccactaaaccacagccacaggaagctgaggatgaaaatcccctttctcagagcatctactatgtgccagttctgtattagaagtttcaaatgcatctcatcaaattctgagtccatgtgagataataattgccaaattaaaaacaatttaaagagcaagaagggattctggagatcatctaatttattttaatattacctaaatgagaagtggaggcagggagggccttgcccacagctgtgtgttcctgagtaactgggcgggactccctgcatcccaggcctcctacgcaccctccagtgccccttcctctaaacactctgtagctgcattcactcacaaacacccacagaccctgtaaaatgctgctcctttgcttcctgcttagacctgagaagtagcctctctccctgcagccctggagatccttcaccctgatcttgctggacactccatggcccccactgctgttgggtaagagtcgcctccccctgcatctggacgtgtggctgcagggatcctgacaccggctcactgtctgcaagcaaagccctgaagacaggaagccccagggacccgtctgagagcagagacctcacgtctgctggggccctgaacacaggaagccccagggacccgtctgagagcagaggcctcgcgtcttctgggaccccaaagacaggaagccccagggacccgtctgagagcagaggcctcgcatcttctgggaccccgaagacaggaagccccagggacccgtctgagaacagaggcctcgcatcttctgggaccccgaagacaggaagccccagggacccgtctgagagcagaggcctcgcgtcttctgggaccccaaagacaggaagccccagggacccgtctgagagcagaggcctcgcgtcttctgggaccccaaagataggaagccccagggacccgtctgagagcagagacctcatgtcttctgggaccccaagacaggaagccccagggacccgtctgagagcagagacctcacgtgtgctgggaccctgaagacaggaagccccagggacccgtctgagagcagaggcctcacatcttctgggaccccaagacaggaagccccagggacccttctgagaacagagacctcacatctgctgggaccccgaagacaggaagccccagggacccgtctgacagcagaggcctcacgtcttctgggaccccaagacaggaagccccagggacccgtctgagagcagagacctcatgtctgctgggaccccgaagacaggaagccccagggacccgtctgagagcagaggcctcatgtctgctgggatcactcagtgcacacgggcatgtgtggtgtgtgggaagcaggagggaagcgaggttttattaaagcacaggtgctttacctccaagcaggagtcagcattttccatggagttctgctgtgaaccctctggggtttgtgaccaggtcaggctgagcagactgggatgtttacgagttcttacgcacacccttcacagctgagggtctacaattcacgcttgtgggcaattcatgaagaagagaggtgcacatcactacctccattttgcaaactagggctggggtcaggagagctgcccgacgcttagagggactgtggagctctgtgggcaatggacacgtgacaggtggcatttatagagcacttactgggaacatgacaggtggcatttatagagcacttactgggaacatgcactgttgcagcactttatgtgaattcacacgtttaactctcaccacaatccagaaggaaggtgcagatgaggactctgaggcccacccaagaccgtaaaaccagggcagggccataggcagatacaggacccgacccagagcccacactcagccatgctgcccccgggactaactgcctggcttgggtggtccttagtagagcgggcggcatcaggcctctctgctcttggtcgcctggagatcccacagccagcaggatgcacccagcctccctgagaaagatagaactggtctggttcctttccctgggtttagggggctggggccaaagagaaaaatggtaggccctgaacactcttcttgtgatggtgggatggacctgctattcaggaaagcctcaactggctcccccaggtccactgtacccaaaggaactggctgcctgaacacatttggtaaaagagattgcgaagccacccaggacactccccgtgtctcagcgtcactaccaggctctcacaagctgatcaatctgagaccacctgagtttgaagcaccagggctgggagtgcaagttccgactatgaagagagggcagcacagagggcgggataggggtggggtggggaggggggcagagggtggaagatgagagggtgggagatagggatgggagagagagcggggcagatggcagggcacagggatagagggcaggagaaagggcagggcagagggtgggagagagggcagtgcagaggataggatgggggggtgggacagggggcaggagggagggcagcacagaaggccaggcagagggctgggacagaaggcagcacacaaggcaggacaggctgcagatgatgctcagaatgcagccaccccacgtccagaacgtcagggcaggaggggacatggagatggtttaacctcacatgcccactttagaggcaggagagtggggtcccggggtgccaggtgtcttgctgaaggttgtgaaataaggatcagtgaaacggtgagaccattccttccacccttgtgtttccctggcatatgtgtcagccagctggtcaacacatgctgcgttagcaaatgctgaaggcagggtcgtccctggcatgaccccctccccataacccacagcccctcttccccagtacgccgtggcagcctgccatccgctctctgctcctctgactaccttcagcaaccctgccttacggtggggatgctggacaggcattcaggagacacaaatgtcaactcctctgtgggttcctgcagcaccgggagaccctggcgcgactcctgagggcttcagtcctcggtttgttccttttaggaggaagccaccggatcgtttcccatgcttaagctcagacgcccacccagcacagcctccgccgcagcctggcagcccaacagaggctggtcatagtttttgccctggaattcccctccttttaccacatttgccacctctggtcccatcttcctttcagggtccaggcagtcttccccctcattaaatcaaatttattcccaatcctctgatctccattcaccagcctcctctgtctctactgtaagacttccctgtccctcgggtgggggcggcatcctcacaggggtgaggagctctgtgctgctgttgagatgaatggtgccagaagggagtctttccaagtgccctgtaatgcagaacctttcccagtgcccactggtggtgttcccgggacaccaggcactggaggtcggcacgcttattgtaatgaatctgaaggcagcccccaccaacgcgctggctgccttggggccaggcatgaagcgaattcagtccacatcagcgggtccaagcctggacctagacacccgtcccagctcagacgctcagctctgggccatcacccgtcgctcagcctgggtgacgcagactgtaataatcatgccatcgtgcacactgtttttcggagcctgttgaatcacatcacaaatgcaatttatagtttgcctcaagatgttttccggaaccttcctgcagagatagcacgaggcccacagaggggtgtcttggggcacctggcaggttccagggtgggagctataaactagaagtcccacgcttctcctcccccaggttcacttgaccacaattctaaaatattaatagcatacagcgtgttaagtgatggcaatgaaagtctggttcactcttattttatcacaaacgttgcataataaaacattcctggtgcccctcgtgattcgcagcctcctgagagggggtctctgttcagggtctctcagctgctgcttttagctcctttgtggggtgcaatcatttcccaggatgctggagtcaggtttctgcactggcaccagctgaagtgttttccatttcctgtgtgaagctcagggggttgtaagcacacacacgtgaccgtcgtgagcaccatcagccctgcctggagcaccggagggtgccaaggggggctttcttttctttgcttctcctgctgcccctggccctgaggtggtgcctgaaatccctgccaataccatccctgttcctgagagcctccttgggcaaagctgggtctggggcaggtaagcgggcagcttcctggggcaccagccccacaggtgagccaacatgggagtgggcgtgccacacttcccaggctgctcacaggcactgctgcttggggatgaaatgtatatttttatggaaatgttaaaaattatttttggctgcctaaattatgtatattgccttccctacattttgataattttttttcgtttttttttgtttttcgcaagaggcagaaccagcttcccgctgtagcagctaagaggctgcactgaagggcagccctctcccctgtctcacctccagtgcacaggcctcctgtggatcagaggctcccacagactctgagtcaagaactccttctgccgctgcaggagctgcagccagacgaggtttctagaagccatggctccagcactgcagcatgagctgcggtgcctggcattgtgcagaagggcacccacgcacggatagggtggctggcatctcccaggctgctctgagctggttccctggctgtcccagcaattccacgagttaactaatacattttcataagcacatttgctgcctaggccaggtttctgtcgcttgctaataagaattaattgtgactcatgcaggattcttggggtaggggtgagggccccagtgggcactgctgcttccaggcaggtccagtgaggaggcgtttggcccgggaaagggcaggcccaatcaggcctgagcagagccgtcagcacaacagaggcacggaacccagtctacttccgatcacacgctgagtaggcactgaaagaaaagtgactgaaatgtgagctcaattcttaatctaaccctgttctcaggaggcacatgccttcgtgtggggctagagcattaactctaaaactgtttcacaagcctctgggggcttcagaggcatctcagtgagtcacaaatgcatcagaaaaatgcaggtaagctctggctcttacatgacgaggggacattttcagtgagttaccgagacagttagaggtgtagctttggtaagctaaattgaataaatgactagagcttagcatagactgcggtctgggcttcagtaggaattacggctgccgtgcagggcggggcaacatggcagagcttctcctgagcatgagcatgtgcacaaaattgggattctaccaccgccaggagaaattattttaggttggtcatggctttctattgttactctaagttgcttcccctcccccctttaaaaatatgttattttaacatacgtcagatttatagaaaagttgtaagactatcatacaagaatctcagacactcgtcacccgattctccaaatggtaacattttaggctttactctcacctgcaaaatctctctctatatttatatttacactgatatttgtgctttattattctgaactatttgagagaaacttatggacatgattttcccttagttctaaatacttcagtgcttatttcctaaaaacaaaggcattctcctacataatgagagtacagttatgaaaaccaaaaattcacactgatatggtactaatatctaatcaacagaacttacacgatttgtctacttctcccaagaacatttctagaacaaaataaatgcccacatgaggccctgcataccgacgtcatgtctctctagcctccttcaatttagaaaatccttcagttcagtctttcttggtctttgtgatagtgacaactttagaatggggtgagtcactttgattgacagtttcagattagaggtgacttactttgacatttttagagtaggggtgactcacttgaattgacagttttagaggaggggtgagtcagtctgattgacagttttagagtaggggtgagtcacttggacatttttagagtagggtgagtcactctgacagttttacagtagggttgggtcattctgacagtttgagagtggggtgagtcactctgattgacatctttagaggaggagtgtcattctgattgacagtttaagaggaggggtgagtcactcggacagttttagaggaggggtgagtcactcacagttttagaagagggatgagtcactccgatggacagctttagagaagtgactcactttgactgacatttatagagtaagggtgagtcattctgattgacagttttagaggaggggtgaatcactccgattgacagttttagagaaggggtgagtcgctctgattgacagttttagaggaggggtgagtcactcattgacagttttagaggaggggtgagtcactctgactgacagttttagaggaggggtgagtcatcctgattgacagttttagtggcggggtgagtcagtctgactggcatttttagaggagggatgagtcactctgactgacagttttagaggaggggtgagtcactcattgacagttttagaggaggggtgagtcactctgattgacagttttagaggaagggtgagtcactctgattgacagttttagaggaagggtgagtcactctgattgacagttttagaggaggggtgagtcactcattgacagttttagaggaggggtgagtcactctgattgacagttttagaggaagggtgagtcattctgattgacagttttagaggaggggtgagtcactctgattgacagctttagaggaagggtgagtcactctgactgacagttttagaggaagggtgagtcactctgattgacagttttagaggaggggtgagtcactctgattgacagttttagaggaggggtgagtcactctgattgacagctttagaggaagggtgagtcactctgacagttttagaggaagggtgagtcactctgactgacagttttagaggaggggtgagtcactctgattgacagttttagtggagggatgagtcaccctgattgacagttttagaggaggggtgagtcactctgattgacacttttagaggaggggtgagtcactctgattgacagttttagtggagggatgagtcaccctgattgacagttttagaggaggggtgagtcactctgattgacagttttagaggaggggtgagtcactctgattgacagctttagaggaagggtgagtcactctgattgacagttttagaggaaggatgagtcactctgattgacagttttagtggagggatgagtcaccctgattgacagttttagaggaggggtgagtcactctaaatgacatttttagagcaggggtgagtcactgatttgcatttttaaagtaggggtgagtcactttgcaccatgctccttggctggtataccgtggctgcctcaggaatagactgggttttgctctttgtcgagaacaccagggacatcatcttttgtgttctttgtgcatcagctcaagggcacgtgtgcggatccatcttgccgctggtgacgttcactggtatcacttgttaagcgctgcctgcctggtttctgcaccgtgaatgctgttttcttctgatcctatcttgtggtgagagctattctgtggttctccagaatatcggccgctcattttagcatcaatgattcttatctgaatcaagtagtactaagaattgatttgactttaacataaagaatttccaatgtgagaagatttcagtattcatggctacagatgccaagtgtgggcaacttatcttttatgcgccttcaacaaagccatgggagcagagagagggaaagaaaatctgaaccagtatgagtcaactggcacatcggctcacctcgatagcatttgcacatttgactggaagcctctggcttgtagaattttttcccactatagtatagaacactccacttcaatttttacttgtttaaaagaatcacatttgtttaatttccactctgacctgatctttgctctgccacagggactcttcacttggcgatgatgagcaaagcatccggccttggacctcctgcttcccagagcctgcagggctgtctcacttcctccagaagctctcagtctgctgccatttcttgggttcttcatccttcctgtggacctgggtctccaactgctgtgatttcccatcagtcagaagaggtccgcagcattttgtacagtgcaggtctaacatggcagattctctcgggatgggctggcacgaaagcaggtttctttcacccttatgctgaaacatgtttttgctggagatagaactctgggcttttgttttctcccttgcagaaccttaaagagttgtcaaattgtctcctggtttctgctgtttctagtgaagaatgaagtcagtcctcatgcatatcattgctcctgggaatgtaacgtctctcctcccagctgttaagattttctatctttggtattttagcaatttgactacaaatgtgcttatgttaattttctttgcacttaacttgcttggggttctctgagcttcttctttttcaccaggtggagggtgggtagggttgctggttttgaatattaattcttctttttttgtgtcccacctttcttggctcatcttctggaactgtcacgtgggtcagaccacttgactttgtcctagaggccacctgggctcttttttgtttctggcatttttctctgtccttcagatgcgatcatttctgtgcatctgttccaagtttgccaattcattcttctgcagtctctgatccgctgtaaagcccatgcagtgaatttcccatcttacaagctctcctttctaaaatctacacgtggttcttctgcacggcctccatctttctgctgaggttcccacgtgtcccctcttctccgtctttccctttacgttcttgaacagatctggaattgttgttaagtccttgtctggttgatttcagtgtctgtatcattgggactttcttttctcttctttatgggtcctaatgtcctgtttcttaacatgtttagcaattttggactgcaagatgaacattggcgggtacatcacaggaacctggtgacagtccactccttgcttttaaaattggagctccctgggaggcatcggcatctgtgtcactccctcaggggggtctagccatcctcagcatctgtgtcactccctcaggggggtctagccatcctcagcatctgtgtcgctccctcaggggggtctagccatcctcagcatctgtgtcgctccctcaggggggtctagccatcctcagcatctgtgtcgctccctcaggggtgtctagccatcctcagcatctgtgtcgctccctcagggggggtttagacatcttcagcatctgtgtcgctccctcaggggggtctagccatcctcatggtgcagcaacgccattctgtcctgtgtgcttcgcaatccgaaagtgaaccgatcgtaggtgtatgactacagcaaatgcagacacattctccccactttccctccctgccatggttctctagtacaagatgcttgaattttttctcactgagcttcactgctgccactggaggtctgaattgattttgcctcaactagttagagaagactgagactgactgagccgaagctctctgctttcttgaggtgacgagatgctatcgattatgggctctgtgcccctgtcacgttcacacgacatcccaaaccagactctactgggctcattcctcccctctgcctgtgtccctcactccaccaggccccgcgagcatcctccctgtagctctctggccaccccacctgtttctcttccacggaggcacctctgtctcctggattcccaccacctctccctgttctcccgagcaccactcaatctcacttctagtgtctcctccactcggaagccagggtgggggtctacagtgcaggtcggacacctcccgtgtctcctccactcggaagccagggtggggttctacagtgcaggtctgacacctcccgtgtctcttccactcggaagccagggtgggggtctacagtgcaggtctgacacctcccgtgtctcctccactcggaagccagggtggggttctacagtgcaggtctgaacacatgtgcagccctgtgcaaagctcttcagaggctcctcatgccctctggagaattttcaagttcgcagggagtgtatgaggccatcctttcggtcattcatgccattttcccacctctcccctgtctttccgccatggccagtcatgggaattttcctaaacatagcctctttctcatctgtaaaaagtattctttctgcaatattctgtaaaaagtattttttctcttgtagaatgtctttctgcctgcccctctcacccgcatgtcaacccccttcactggggcaatttctcttcatctcccagacttggcctgggccaccttctctgggaagccctccggacccctgaacaccgtgggtctgacaatatctttatgctccttctgcatctgggcacctggaacttgccgtgagcatggctgtggtgggtccttagcccgagtgaccacgtgaacttgcagctggcacacataggtgagtaaaggtccacacggggctggaccacctagaaaaacagcttttgcttatttacccaaagtaagctgtgctggggaaaggaagaggaaggttttgaaggtggatacagaatttccgtctaactgagcacgtggggactggagcaattcactgaagaaatgaaaggtgcgggaataggcaagcccttgatgtctggagcagatcgcatcagctactactaagccgctgttgtcaggcacagagaagacactcagcatcggatgagagaataaagccgtgtgcggtgtggcttcatgtctctcacaatagcgctcccgagtgcggccgctccacctttcccacccaggagaagccgcttaaaaagccaggcaggggctcttcagtgcaaaggttctgccccggactctcaccagctgctgagagcgggtgcggcctctctgagttttggcttgagccggggcctggaaaggccaactgcctgttggcctaaagagctagaaaaggatgaatggattcatatttacaaagacaccacagagtctgtctgaacagtcctgcgtatctgcaatctgctcgtcacccatccccttgtgcctagtgacgtgagccccaggacagtctgttcagtagcaccatttgcaacccctgtgatgggaatcttcgtgactatgtgacatgttccccatctctctctctgttgttttattttcctttgacaatgtcaagctggaaattagaagcaatgtggcatgcggagccactcagatctgaagcagagtgcatggtggggccatctaagtatgtttttctgcacaatgtgaaccccggctgttcaaagctaagagccacccactgcagggcacagtgctctggtgagaggaggtcacctcgaagtgggccccccgcatggtgctgccaaatgcacgcacagattacactttatgaaaggtttcctttgctttgaatagttggctgtctcagaaaaactgcagcacccactggttggaaattacatctgaactgcagtggagatgcaggggagacatcgcacaggagcgtcagccatgggacagctgcacatgcctgcagtgtcatccctgccagctctcagaggcacctgcttctgccctggggatcctgctgaaaggttcttgagctgctgctcagcagggacacaggagagggccggatgtgaggggtagacactataagcagacctgcaggcccagccatgccacgtgcagaccactgcccaccctctgcagatgggaaggagaggcccagggaggctgcctgtctgctcagggtcacacaacaacacccaaaggcaagatgtgaacccagatctgctttgcactgaagacctcaatttttactattagtcttaccacatagacaaattaaatgtgacgtgtttaagttgcattaaactgatgagatttgaggaagctcttttccaaaaattctctttaatatcaaagatacattgtccttgtagtacactaagcatgattgtttttgagtaaaaagaaccaccctttggggtgttggtgcttatgtaggatgatccaaccctggcagtaaaagggagggttttaaatctaccggagtggcccacagaaaacaacctgccggtgtcaagatgctcatatcagtgctgaagtaaggagtggggctctttgggagcatcagagcaaacttcttgtccatgatccacacgggctacgagcccctgcagtgccttgtgcatggtggcagccacatcaactcacacccaaattccgaattacagtcagataaagtaaagtaaagcatgcaggtccccacctcaacagcaaggtttccagcacccaaattccgaattacagtcagatacagtaaagcaaagcacgcaggtccccacctcaatagcaaggtttccagcacgcaaattctgaattacagtcagataaagttaagtaaagcacgcaggtccccacctcaatagcgaggtttccagtatccaaattctgaattacaataagataaaataaagcacgcaggtctcctgtctcactagcaaggtttccatcactgagcggccacaggggctggtggctgtcctgcaggacagcacacatgtgggccattctgttgccacagaaagtgctagaacagagctgctctagagaccaggcctctggctgcaggagaggagagctggacagccatctgcagaccaggtcactctcagtgctgtgtgttgtgggtggagctcaccaagtgccaggattcaccctgtggacacagccacatccccagtggggccatcatctgcatatgaacctaatttgccaaaacccataatgttgggttagcaaaggtgaggccctgaggcctcaaccccatcgtccagtgtctactgaaactcagcaccagacagacagagttggcctcagaactcctcagtccagcttccctctggcatatcttacaacctgtgttaataccagggcttttaagatgtgtttgcctagcagttggttttgctaggcccttggataggtgcatttggctgggtactgggcacccgagaaggagaaggttgctacgtatgtgtctacaaatgccacaggtctctggcctgtgagacctcagcacagagcagagtggaggcaatgcttcctgaatgaactaagcaggtccaggaaggtatcactgcacaggcggggaagagcagggagtacccaggtcctggaaggtgtcgccgcatgggcagcagagagcagggaggacctgagtggaggaaggcgtcgctgcatgggcagttgagagcagagaggcccccgttggtatgaccatgagcccctgtcaagagttccagtccaggtcctgagggacatgttctctgcacatttccttctgggcatcatcctcagagttcccatctagtggtctgtcagcgatggtggtgttcagaacttggttataactcagccccggctcctttctgaagcctcagtgcagattcttttctctccccttcctagtgttattattaaattttataaggtctgtgctccttactttcaaagcaaactcttttttgtgccatcaagaggcaaagttataaacagttgactctgtgacattgaaatactgaaattaagaaatgaagaagcctagaaattctcactgttacagaaatctaatgccctcccctgtgacactgcaaatctaatgccctctcctgtgacactgcaaatctaacaccctcccccttgacactgcaaatctcataccctcccctgtgacactgcaaatctaacgccctcccctgtgacactgcaaatctaacaccctccccagtgacactgcaaatctatcaccctcacctgtgacactgcaaatctaacaccctccccaccgtgacactgcaaatctaacactctccccgaagacactgcaaatctaacgcccccccgtgacactgcaaatctaacgccctgccccatgacactgcaaatctgacaccctccccaccatgacactgcaaatcaaacaccctcccccatgacactgcaaatctaatgccctccccacagtgacactgcaaatctaacactctcccccacaacactgcaaatctaacgcccccccatgacactgcaaatctaacacccccccgtgacactgcaaatctaacaccctccccaccacgacactgcaaatctaacactctcccccgtgacactgcaaatctaacactctcccccgtgacactgcaaatctaacaccctccccaccacgacactgcaaatctaacactctcccccgtgacactgcaaatctaacaccctcccccgtgacactgcaaatctaacaccctcccccgtgacactgcaaatctaacaccctccccaccacgacactgcaaatctaacaccctccccaccacgacactgcaaatctaacactctcccccatgacactgcaaatctaacaccctccccaccatgacactgcaaatctaacaccctccccaccacgacactgcaaatctaacactctcccctgtgacactgcaaatctaacaccctccccaccacgacactgcaaatctgacaccctcccctgtgacactgcaaatctaacaccctctcaatcatgacactgcaaatctaacaccctcccccatgacactgcaaatctaacatcctccccaccatgacactgcaaatataaccccctcccccctccgtgacactgcaaatctaactccctcccccatgacactgcaagcgattcttcagtagacccaggtctctgggtacttgaaaccagagcagccacagcaagccactgtgtaagagttagcagagaggggctcctggccatctgtgcagggacatacgtccatgcatgtgtataaaagatctctgtaatttttatcagggctaggaccatcctgaaagtgcaggtctcccagagccagccacactccctatgctgggctctgcatggagtggggtcagcatgtggccagctgctgccaaggtctccctcccaatagccctcccagaggcctctgcccaccttcaccacctaatctccatgctcaagcctcactgtgtggccaggctgagtgcccatctcctcacaggacacagcgctctctgcaggacttttgctaagtggttggtcccctgcagcaacacacaggggtccacggcacaccctccacacacgggggtccccagcacaccttcaaatatgggggtccttagcacaccttcgcacacgggggtcctcggcccaccctccacacatgggggtctgcagtgcaccttcactcatgggagtccttggcctaccctccacacacgagggtcctcagcatgccttccacacgcacaggggtcctcggcccaccctccacacacaggggtcctcggcccaccctccacacacaggggtcctcggcccaccctccacacacgggagtcctcggcacgcctttccagaggaggtgatcttgaggcaccacaaaagcagcacctggcccctggccgctcccagctcagagcccacggtggggtcctcagccttcaccctagttttgctcccgcatctgagggctgcgtgtcacctcactgtgacttctgactgcacagcaggtgttggtgtggggagtcaggcagcctcagcgaatgtcctgaaaatgctcccacagaatgtttatatctttacagacacaaaatgctgctggggtaatactcttgggaagtatgcaaatgagttctttttcagatgtcaagcaggagcgatgatcagagaatcctctcattgagactgggagctggtggaatatgactccaccagctccagaccccaacttctccgcgttcacctgtacatcgcaagtgtctaaaaatgatgtgtatcccctcccagtccctcactgtctttccccagatcacacccccacaaccctgtgctcacggagaactgcccccaccttttctaggaaggagggcttggttatcagtcatcctcctgccatctctgatgacaggcagtggcaggggctcaaccttgtccttccttttcattcccactggtgccaccccagccaccttcatctgcgtagcctgaatcactgtggcctaactgggccctgggtctccatgcttcactcccaaagtcaaacacaccgtctcccatccctggcatttccatgccctcacttgacgaggatctgcaagagccgagctctgtgatgggcagcaggtgtgcacagcaggagggccgggcctggtgctcccagcatcttcaggcttaaaaatttggccccaggaagcctttgcattcataactgtagctaccactattcactgctccaaaattcaaaggaggagttctcgagacccaagaacacacaacacacattccactagcctcgaagccgcatcctcgcacatctcacagcctggggaagcgatgcagaatctcaccagaggataaacaggcaaagaactttggggctttgctaggaaaatgtcttactctgcggacccccagagggtctcagggacttcccatgccccctcccatgccccagacggtcctttctgaatggccgacttagacaaaggctacaccctttaaattcagtgacagccaacagaatcacttcctgcccttgaaatccaacaatgtctccacaggaagcatctgctggctcagcacagcaccagcttcagcccccacctccgccccatccctgctcctggacctgttggttccgaggaggccctggacaccaagacacccaccccagatgcccagactccctcaacatggaggatccccagactgagtcctccacaaatgctgaaaccccctcccaagatgccaaggaagccccccacccccaggatactgaagtcctccccagatgccaaagctcccagaggccaagcgctccctaccctgacgccaaggcccctctaggacaccgaagcccccgcctcctctgctgaggaagtgccattccatggaaggcccggctcagcctccctgggtcaagctcctgtctcctttcaggaagatggaagttcacagaggccgcaggtgtctaagggtcaagttgatcactacaccatccccttttagtgtttttgtatctgttttgactccctattatttttctggtagttcatctttttatgtgtttttaactaaatccattcagacaatcttgttcttcctctgccacttttctccacgttgtaagggttttaaaccaatgtttctaagggagcactgggcttcatttgacatttccagtaagtatcaaaagctgctatcacttcaattacagacactccgagcccaggacaggctccagatgcccggccttcatgcagcaaacaccttcacagggaaggaaggcggaactctctttccttgccacagaaaaggattctaacggcatttgacaaagattgagcatggttcgtcgcgaacgccagcctgcccccacggtcatgtccagcttaaccaacacacggcccagcagtctcggtcagtggagcccaccacccaagcgggggcggtaccactcccaccactgactgaaccttggaatcaatacaatgcagggtagagcaattcatttgaattaatgtgttaagtggcacaaatatgtgtttatcgagagaaacctaagtttgtgagaaaaggatctattggaaaattcttctttttaaaaaagtttcatggaaaaagcttcctgcaagcatccgcactgctgcaaatataataattgtttgaaagcataacatttaaatcagaagcatccctagacatgttgattagaaatagtcttaagagggtcaaactatgtccacagaggctggaacaccaaaatagaggcaaaagtcctgagaagggagttgtttttagtcaccaggccagtgaccactgtccagcaggtccacgtgcatggatgagagctgtgcccctctcttctctaagccaaggggctgttgggacaggcagccgcacctggccagctctgcccttgctcatcagctgggaagcagcatgcttcttggggggcaggcattgtctacaacacagactacacagtccacagtccacaactcctgaatcctgcctagtatttatacagtaaacagagactctgaaataaacaccgtgccgaatggagcctgtgcagctcccagtgctgtgaccccaccatgatcgctcatctgctccagctggagcactctgcctctctacccattttcctgctctcaccgagtcaggcctcggaccagcccctgtgtgagatggagatgtgtttagtgtgggaggaacacggtgagaggtcagagacagagcagggatccgtgcagggatgcggaggccccagtgctgggtgttcagggctgactcctccctccccaggcacctcctgccagagtgacctcatgagccctcatggtttcaaccccacccattcgcagcagccacatccccacctgcactgggttctccttccagactcacagcctccgcctgctagctgctcccggccaacccccatgggcacactgaccccgtgtgtcccgaagaccccccgcctgcctctgaaggcccttccatcctactgctcctccatcctggcgtctgacaaatcaatgtatctttccccgtggatgtttctccaacccattcactcttctcccgctcagtgacctggcccctgaacctgccgttcccaactcagacaaagccgtctccaactcggacaatggcgcctccaactcgaacaatgccacctccaacttggacaatgtcgcctccacctcagacaatggcgcctccagcttggacgatgccgcctccaagtcagacgatgccgcctccagcttggacgatgccgcctccagcttggacgatgtcacctccaacttggatgatgccacctccagcttggacaatgccacctccagcttggacaatgccgcctccagcttggacaatgccgccttcccacctccacaaagtctgcttcctaaagagcaagtccagccacaccacttcctggcttcagttgtcccatcagacgacgggtcaccaacagctggggcattctcaggagccaagctgggtgccttcccccttcctggacatccctaccctgcttgctgggcccagtccaggttctggaagattctgcctttctgttcagctgtcccacctctcagttccgacagtgtgagcctggtggctaaagattcctaatctggcccttgaagactcaggcaaacttagaagctcctggtttcaaacttctctttcccactttgcctcttgtcttgaggtggcagaaacagctgatggtgaggcaggataatacggtctggaggcaagaagcaaccacacttttctagtcttgtgaaacaaccaaagcaactgtctgaagcctcttcagctggcccatgcctcatgggagttttgtagctctttctgcgtttgagaagacactaaaaaaaaaaaagtaaaatccagctggtcctgagagacaagagtttcctcaatcctggaaattcagcaggaaaaatactgtttatgcactgaatgaaatcactgaggccaagaatagttatttgttcacaccatttcatggatgcctatttttgtcccaaaataaagactctgcatgtcaccatgttgatgcatctggaaacaagtgagaggctttgttatcagcatgcagcccagatgtgaaggcccacagcagctcctgagggcacgtaagcttgcaggaacaggatgatcctccaccggctgcctgggccatctgtgtaagggccctgtggactgagccatttacatcagttaggccagcagccacagggatggtgtcaccactgtgggattcaacactttgaagaattaaggcagaggttacttttgtccacaaaatcacatcctgcagtaaggatgtgggtacaagtaatttatttggaggatgatcccagaagccaagtgagagaacgggacagtaagcctgagaagggcggaagccatgaagtacatgcacaaaccaccagtgtggacggccggggcccgacactgccggagaccctctgagaggcatgtgggatgtgccttgaatcgtctgagggtcaaagaatcaggggtctctatccattgactcccatcccttgctctctgaagaggtgaactcctgagcagccctggcctgccctgggtgtgggctagtgtgctgcttagctcagacagaccaaggcaggtgcttaaggctggagccatcagcatagatgggagctgccctgcagagctgaagggaggcacagggtgggcaactgggatgtgggcaggatgcgaaaaggtctgtcaaaggggtacttcttccaagtgggccaaagactccatcaggtcgagtagtgacatggaaatcacagagcaggtggctccaaggatctgtccctccactgaagtaacaagtaagctgacaaaaatggacagaagtgactgttctgggattctgtagtctaattttaaaaatcagcagtaaccagggggtgctaaattgagaaagagaatgctaaattttggttaaaagacattctgtggtttttgcttgcccacctattattccccattccccagttcaacagcagctacaggattggtggcctaagttcctggtgagatgtggtggtaccagggggcagtatggatcttgttttcaaaaaactgtggctgtgtgttttgagctgtctggtggttccttgagaaaccagtgcaaagaggaaccctgttttagcacctttgggcgagactggctttccaggaggaagctgacgaaatcatgtatagagttatactgaccaatactatcccaaatttgatgaaagacatgaatatacatatccaagaagctcaactaactccaagtagaattgattcaaagagatccatgctgacatattatcatcaaaccatcaaaagccaaagacagaaatttgaaagcagcaagagagaggcaattcatcttgtacttgagatcgtcaataagatcaacagcagtttttcaccagaaaccatggaggcctgaaggcagtgggatgatgtatttaatgtgctgaaagaaaaataactgtcaaccaataattctgtatcaggcaaaactatcctttgaaaatgaagccaaaattaagacatccccttagaagcaaaagctgagggagtttgtcactagtagacaagctctgtaagaaatgctaaaggtgacaggctgaaatgcaggtcattgaggctgaaattctaaacagtaaccagaagccatacaagaaaataaagaacttcagtaaaattaactacataggtaaatataaaacccagtattgtagctttggtttgtatctcctccttttgtcttctatatgatttaaaagacaaatgcataaaacaataattataaatctatgttaacagcatacaatgtaggaagagataatttgtgacaataacaacataaagctgggaaggaagctattcagaagcagtttttgtgtgcttttgaagctaagttggtataaattcaaactacattgtgataaatgtggggtgttaattgtaattcccatggtaaccactaagaaaataacaaaaagaaatgtgcaggaaaagaaaatgagaagggaatcaaaacagtacactaaaaattaaatcaaagaaacaaaaaaaggcaatatttgaggaactgaggaggaaaaaaggtgtaagacatacagaaaccagcagcaaagtggcagaagtaaatccttccttaacagaaattactgtaaatgaaaagggatcaaactcaccaattaaaagagagactgacagaatacatttttaaaagtatgaccaactacgggttgaatatccctaatccaaaagtccaaaatctaaaatgctccaaaatctgaaaatttttgagtgcctacatgatgttcaaaataaatgcccattgaagtattttggatttcatatttttggattatggaagctcaactggtgagtccggttggccttaaaacaagatgtgtttgaatcatgcaggtccacttatatgcagatttttttcaaccaaatgtgaattgaaaatatagtactcgtgggattcaaaacccatgtatacggagagctgacttttataaatgtgggttctgcagggccaactttgagacttgagtatgcgtgaattttggtacacattgcagggggcgggtgtcttagaaccaatcatctgcatatatgagatgaccacaaatgttccaaaatttgaaaagatccaaaatctgaaatacctctgtcccaagcatttaagataaggtatactttgtatgtaagataagggatatatgctgtcggttagggactcacgtaggatccaaagttgaaagtaaaatgatgcattttgggatggtgaaaatgttacatacaggtggcagttgcacaatgttgtgaatgtaccaagtgccactgaattgttcatttttaagtggttaattttatgctatgttaattttatctcaattttttaaaaagactccctcaatttagttttgtttcattcatctattccctatttatttgcctctctagattataaaattgttgagaacatggacaggagtttattcctctttgtgctacccagcacagtgcctggaataataaatatttactgaaggcatcactaagcatggagttgaacatcattgaggggctcagacactggcggctgagtcaatgccatgcttgctgcaggacagcctgcccaggccatctcagtctcaggtatttcttcatagcagtatacgaatggactaatacaggcccatattccaagacccttaggaacaagtggtaattgtttactatctagacgggactctcctacttgataaaagtctcctgctctatagctccacaaacagtaaatttatttgaaatcaataaatgaatgattaagcactgtgactggagagggccgaacagggttccatttccagatgtttcccaggcactgatgattcacttcctggggccgggcaagttccgaggctcctcagggtctcctcaaacaattcaggcttctttaagcctccagcttgcaactatctgactcattaagttgaagttggcaggaaagttataaaggttgtacttgaatcacagtcctgagatcttgggttgagatgctttttatttagcttgtgcatcaccaacttgtaaaaaatatcttggtaaaaaaatttaaaataaaactttaaagtttgtgttatgacagattaaacatttaatgccacatggtgtgtatatctcaatggaaacactgttcttgtgtgttcagtatctgtgtgcatgttaatcttcctgtgagatcataaagctctgtaagggaaagggtccaattgtctcaccttgaaaattccaaacctagcaaacgcctggtgggaaatacaaacccgcaggcgtttctgagtgaacggaggttgtgccaggtcaaatgctcactgctggtcccgtcctgctctaaaatgttcagatgcataatgggttatttttgttggtatttgggtgggtcgaatgctcactgctggtcctgtcctgctctaaaatgttcagatatgtaatgggttatttttgttggtatttgggtgggtcaaatgctcactgctggtcttgtcctgctctaaaatgttcagatatgtaatgggttatttttgtcggtatttgggtggtatttttgctctatgacctcccatttctctgacgtctctagattcctttgttatttgtgatttctgcttctggtggtgacaacaaaatctgccattgctgtgcagccgcctcacccatggagcaggcttatcctctacaactattctacagaaaagacaagcaaggtctgcgtggagtgaaagcgccttctttccatatcggatgctggaagctgtgatgttggcaaacggctctttgcatgaagtactgtgtactgaaccaggaaagtgaggtgcagacgcggaagtcaggtgcagatgtgttgggcagatgagctatggtgatggcgggtggccattccctataagagagtggctcctctattattaacaaaataaaaattaaagaaggtttccattgagtttgctagttcttcactagcaatattcccagctggttgaccttcatttgttttagtttgatttcatccaacacagctttatcttacctgctgcccacaccctactcttgagagcacgtactcctggcaggaccccaacccaggaaaccctcccatgccccaggtgccgtcccctgaccaaccagcctcactctcagagacaaggatgaaacgcatatgaatatccactctaatacggttcagagaaggatgatctgttatctgaaacttttactgcaaaagctcttttaatcaaaaccttcagaaaatttgaattttactccttgcaaagattatttggttaaaaaaaaaggacactcacaacaattaacatatgactggggatgtgtaagaacagcgaagagaactggacaggctgtgtcctgggaacagcgcccggtgcacacacccctttccatcttccctattggcaccttcagtccccggaggcgctgctgatgctcataggaagggactaaggccttcacagtctgtcaacaggagggtcccatggggctccatcacggtctctgggaccccccttccactgcagcaaagtggacaggtgcactgcatcaacatctcaacaccgggtgaaaagggaaacgccttactaaacgatgttcccgtgatcagaatcacgggctaacgtccctccgcttccgcagtcttcaggcctcaggcactgccagtgacattagctgctgtgcgtccctcctgccggactgcaacaccgtctcaggatccacctcccaccatcttccctgaccatggccctgctccatctgatttgtttgtcctctgatcaggtggggcctgagtccggcagtggatgccagtgagtcagccatggttggcagggactggctggctgcccccctctcttcattggccccgcctgtctggcctgggcgcccactcactcctgctgcacctgccacaactgccggctgatcctgctgctctgatgccccctcacgtctccagcctgcgccccgcactgcgttcgctgcccatcttcctcccaagctcacagtctagctccaggtgcctgctctccttgttctgtgtctgtttctgcacaccctgcggggaggccaggctcacccaagaaaagagtcaaggctgcaccatgaagcctctcgggctgggcagggagtccaggccctgggagccccccagagccccccacagaatgtgcagctagcctcgccagacgcgggcgatggggccgaaccccgcaggacaacttaggaggagtgaagagtggaagagtgcccggtgcagggatgggtgggaggaacctggggtagtgtgcacgcctgagacagggtgggggacacgaagggagacaggcgagggtgggacaggcaagggtgggtagtgtgcatccctgagacggggtgggggacacggggggagacaggcgagggtgggtagtgtgcatgcctgagacggggtgggggacacagggagacaggcgagggtggggagggagacgctgactccgtggtggaacgtgggtaggtgataggctggctccctgagcagcccctcccctgtggtgcagagctgtgggtctaggggtgagggagccatcatctcatctcacgccatggagacacaggtgtggcttctgttcctgtatctctagtaaatgtttccttctgagaaactgggtctgtcagcctctttctcaggcctcttggttccctcagacttgggggtaggtgtgcacaggcctgcctgccaggggacaggaaccccaggggaaataaaggtgatgctcaaacccagaccaccgaatgctctgaacacacttgcttgctttcaggtggaaacattcacagtgtccctgggtacagcagacttcatatcacagagacttccctctccaggacgtgaagatgtccatcaccgagacgtcagcacggcaggtgggagaaagccatgcacacagtgaaggggacggcctccattggcccacagggtgagctatccagttccaggagccacctgaccacagggtgagctgtccagtgccaggaaccacctgaccacagggtgagccgtccagtgccaggaaccaccggacccacggggtgagccctctggctcgagaagtcctcagcgacatctgggggtcctgtgcatgcaccatgttgactgtacccgtgtgcagcttgcacagagtccccagcagctctggggagggctccgtgttcaatatgtgatgagctttcgggaaggacaggagagccgggtgtgagaagcctccttcctagggcctgtgtctctggagtgcacgaggcagatggatggagacgtgggagcaggggctggcagcactccccgagcacagtgggaactcaggagcaggggctggcggcactccccgggcacagagggaacggcctgggtggcatggagagtgtcctcccaggatacagcggagtgcccgtcaccacctgcccaccttcttcacaccatgaggctgctggcacgggtgcctttgctgccggctgctgtctgtgctgccctgcaacctggatccacatggctggaggtccggtgtccctaaagacttctatgacatcctgacactgccctgcttggacactctctggacaggagacacctcacccctcacagacatctcattttttcagagctgcatcatcagagcagttgggggacaggagggccaagtctgaggactcagacccggggcagctggtggaagctggggttaagagtggaatacatggccaaaggatccctcctgagggtgagggcgaccgagaaaggaatgagggcataagagcggtgctggagaaatgtaagcaaatccgcatttcgaagcagaaatcgctggtttaaatattctctcctttccctcaccatggaatgcacaaacgcttgaagatgcatgtgtgttagagtctcttccacagaactctctggaaaggccgttccaagagcttcaggtgttcaggttcgtatctgaggctgcaacaggcagagccacttccagtttcctgactaaaaagtgaaagttccagaagcattcctagatctgtggtgtgtgtggtgcacgtgtgctgtgtggtgtgtgtagtctctgtatgtgtgtccatgtgggtggtgcctgtgtactgtgtgtgctgtgtggtgtgtgtggtacatgtgtgctgtgtggtgtgtgtagtctctgcatgtgtgtccatgtgggtggtgcctgtgtactgtgtgtgctgtgtggtgtgtgtaatctctgcatgtgtgtctatgtgggtggtacccgtgtactgtgtgtgtgctgtgtggtgtgtgtggtgcacgtgtgctgtgtggtgtgtgtagtctctgcatgtgtgtctatgtgggtggtgcctgtgtactgtgtgtgctgtgtggtgtgtgtgtggtgcacgtgtgctgtgtggtgtgtgtagtctctgcatgtgtgtctatgtgggtggtgcctgtgtactgtgtgtggtgtgtgtgtgtggtgcacgtgtgctgtgtggtgtgtgtagtctctgcatgtgtgtctatgtgggtggtgcctgtgtactgtgtgtggtgtgtgtgtgtggtgtgggttgtggtgcctgtgtgagaggagtggtctcagccggggtgatattaaggcctgcagtacagctccagaccccagagcgaggccccgcctccctgccgagccccagaaacccccttttcaggggtggaagtgggggtggcctctcccatgcagttgagtgtcctgggagggaaagcacagaagttctttctggtatctttagaaccaaatcaggtgaggtgtttaagtatctcatatgttttttggtcatcatttctatttactcctgcaaaattattttttaagataaattaaaagaataataaaccgaaatactagacttaaaatttaaaaatttagaaattgctggcaatctttttgtttttacaaaatgccacttcctagtttgtttctgggtagtgtgggagtgaagcgggtggggtggagggtgctgggccagtgtgcctctcaccgtccccaaggagccccctggagatgcagtccagaaagacggatccaccggccatcccaggtaccaggagcagcacacacgaatgctggatttgtgcctcacactaaaaagcagcttggtgtagctgcgaattttctatccaggcacatctcttcactgctgattaagctacctctttttgccaaacatactctatatttgtgctggatcacaggtaatttggtggagaaaagcaattccaaggaacacaggggagggtaccatcatgtttgtgatgcatggaattccttgcagctgggagacctatctagaatgctgagccgggctcacatccccctgggtgggagctatttctaggtctcatcagcagccaggggagggcttaccagtaatttttaagccatttcaacttctctgaaggcaaaacctgggaaagcaccgcaggcccatcacagatcccctgagagaagcaactcctcaattctgcacctgcgtctgcttccagacagcacacagcaggagggttatccaagcatttgaagaaatgctctccaggatcaactctcttcttcagacaactcccaaccattgtggttttaagtggcagggcacagctcagaagagaaagacaaggagggcaaggcggcaccgcagctcagccccgcagggtgctagggcggacaccctgcggggtttgcctgggctctgcattcccatcccttcattagcccaggggtgtggaacagtttgcacccagctctgggtcttcatacgtggaggtcaggagagtctcaaatagtgcatctgagaaaacccccaaattggtgcgatttccaataatacgtagcctttgcatatttctaaagagagtcagaggttggaaggaacccaggagaccaagggagaaacccgcacattctgacaggtgcgttttctcatcaggatgtcagctgctgggacactgccccaggccattcgtgtgctgctgaaactaggatgtgtttctcttgtgtttggatgagattttattcttcctacgtgctggcatttagtacactgttgtttatggctgtttgatgagaaaagcctagggacggctggtttaaggtaagaacattcacagtgtgttatctgcatgcccagggctgtgagggagcagaagacacagggttggctccctgacgtgttggagacagcaagagacgtggagcacatctggagggggaggctgggctgctgctgtagccgtgatcgctccggtccacatctgggttcatttggtgtgtggacacaggtgtctaccgagagggttttacctaagttagactaaacaaggctgcgagccagtcccagtctgtgactctaccagaagaggctgggtccctggctgaagaaatgctgaaaaatcctcagacacaaatgaatctgttcgactcaatgtgcactcaacaattgactggctatccctagccctctttgggtctaccagttgctatttcttgcgtgggcatcagcctgcacacagtgaacaaaagcagctggttcagagctgccagtgctccccaggggaaggactgacagagtgatgccaagacagggctgccctcctccctagggaatgtccaatccatgcatggccaccagaatcaagggcccacagaggaatcaagtttcaggggtcatggtgggaacctcactttcccagaggataaactgttacacagaaggcctgactgcttttggtttcttagcctgtgagttggaattcatttgtgtgactaattcatgtttggaatttacaaaaagaagttgtttcaattgccaccaagtaaagggttcatttaaatctgcaaccttgctagaatgcctggctcatgccactatgaaaacctgcatctgagcccattctgttttgaatggtggacacctagagagtaagaaggaaaagggaaggaaaggtcctacccaacatcagaaccacatgagcgaatggccacttgggaaatggaaatacatttgacctccatggctcagagaggttcagaagggttaataaacagctcaagcacttgcacctgagagcccactgttactctagagcaggggacaagagtcacccaaggtgactataagtccccacaaattcatctgatgtgcacttcccagaatctgcagcaccctgtaccaacccccatcccctctccacagcaacagtgcatcctaactgtgagcttaggagacacgtatttttggcatctaggacttaagtattaatccctgggggggtgaattccataaattaaggaggggtacagtaagaggatgagatgtttaaagagaagcatatccatggaatcaaaatgcgatcagagcattatggccaaataatccctaagaaaaacactgatggtacacacaacagatacaagattcaaaataaatcatcaattaatacttttaaatagtattattgtattctttttatttatctattactattaataattattatttgatggtacaaagtgaaaaggattataagtgagtgtgatgagcatttgcacacctacaaacaggataacacaagaaatgggaaaattcctagaaatacgcaacctactgagactgagtcatgaagaactagaaaaccgaccccaccaggagtgagtaaggagactgaaaccgtagtcaaaaacctcccaaagaaaatcctgcagtcactggtttgatggataaattttaccaaacatttaaagaaggattagcaccactcctcctcaaacttttccaaaatattgaagaggaaacaatttctaactaatcctgtgagtccagcattactctgacacgaaagccagacagacactacaagcaaacaaaactaagaaccagtatcccttataaatactgatgcaaaaaatcttcgacaaaatactagtagacaaaattcggaagttcagaagcatattaaaacgattgctgtaccatgaccaagtgggatgtattcctagaatgcaagaatggttcaacacataaaaaataataaacgcaatacaccccactaacagaatgaaggaaaggacccatatcatcatctcaactgatccagaaaaagcatctgacaaaattcaaccctctttcatgataaaaacgctcaacaaactaggagtaacagaaaatcacctcaacataataaaggccatatatgaaaaatctgcagctaatgtaacactccagggtaaaagatggaagacttttcctttaagactaggaacaatatgaggaggcctgctttcaccactgttattcaagacagtattggaggtgccagccacaggaattaggcaagaaaaataagtaaaaggcatctaaatgagaaaagaagacataaaattgtttctgttcacttatgatatgatcctataggtagaaaatcataaagattttacacaagagatctgttagaacttaatagaatttattaacaaatttagtaaagttgcagggtataaaatcaatatacagaaatcatttgtacttctatacactaaaataaacaatgccaaaaggacatttaaaaagcaattccatgtacaatagcatcgaaagaataaaatatttagggtaggcttaactaaggaggtgaaggacatgtacactgaaaactacaaagtgttgttaaatgaaagaagacacaaataagtggaaagacatcccatcttcacgtattataaggctcattattgttagcttttaatactacccaaagtgatctacagattcaacataatctctaccaaaaatattgatattttttcagagatagaacaacccatccaaaaatttatatggaatctcatgggaacccaaacaaccaaagcagtcttaaagaaaactggaagacttgctgatttaaacttacaacaaagctatagtaatcaaaacagcatggtcctggcagaaaggcagacatatagaccaatggactataaaacggagcccagaagtaaacccttttgtgtacaaatgctttttgacaattgtgccaagaccattcaatgaggaaaagaataggcttttcaacaaatggttctcagacaacttgcaaaagaataaagctggacctgtaacttacatcatatacaaaacttaaaactgatcaaatatctgaatttacaagatgaaactataaagctctaggaagacttagggggaagcttcatgacactggatttggcactgatttctcagtatgacactaaaggcacaggcaacaaagaaaaataaacaaattgcactttattgcactttatcaaaattaaaaccttctgtgtattaaaaaacattatctaaacagttaaaaagtaacccaaagaatgagagaaaacatttgaaaattacatatctgattaggagtatctagaacatatgtaagactcctacacccaacaacaaagaagcaaggattggaatagacatttctccaaagacgacgtgcagatggagagtgagcccatggtgagctgttcaacatcaccagccattaggcaaaagcaaacaggagccatgagatgccacttcacactcctcaggacggccatcctcagaaaaccagaaaacaagggctcatgagggtgtaaagagactgaaactcgtgtgtactcctagtgggaatgtaaaatggttcagccacactgggaaatagcttgagaattcctcaaaaaattaaacatagaattaccatttgaccccacaattccacgtgaggtaaacactcaagtaatgcaaaagcaggaacttgaatggatatttctacactgacatgtatagcagcactattcccaacagccagaaggtggaagcaagctgagtgcccatcaggggaagaacagataaaaaacatgtggtctatacacggcggggtattattcagccctaaaagtgaaggacattcatccaagctacaacacgggtaaaccttgaggatattatgttaagggaaatgagttgtatatataagaggacaaatattatgatcccacttctctgaggtccctagggtcatcagatccataaagacagaaagtggaacggtgggtaccaggggccgggggaggggttgaggagttcttgtttagtgaatacagagtttcagtttgagaaaatgaacaagttttggagatggatggtggagatggttgcatgacactgtgaatgtacttaatgccactgaattgtacaggtgaaaatagttaaaatggtaaattttactttatgtatattttaccataacaaaaacatcattgcaaaagaagcatgggaagaatcataatcaggtgctgttttaaactgtaaatcaataaaacctttctgaaaaaggagttgggtggcacatgtcaagaacagataaaatatagatacattttaaccatctaatttcaattttaaaaatacatctttaattctttccatttaaaaaatgtgcagtaaacattagatatagaaataaaagctctaagaatagggaaatagctaagtaaatatattttcatggatgaaaaattattcatccgttaaaatgatattacaaatgttgaaaagaccaagatatttttatgatacaatgataaatgaaaaacaaaaacaaaaacaaaaaaacatggtcaggcatggtggcttacgcctgtaatcccagcactctgggaggctgaggcgggtggatcacctgaggtcagaagttcgagaccagcctggccaacacagcaaaaccccgtctctactaaaaatacaaaaatcagccaggcatggtgatgggcgcctgtaatcccagctactctggaggctgaggcaggagaatcacttgaacacaggacggggaggttgcagtgagccaagaacatgccactgcactccagcctgggtgacagagcgagactccgtctcaaaaacaaaaacaaaacaaaaccaaaacaaaacaaaaaacaagcaaaaaccaaaaccatggaagtgaaattctcaattatattaaaatatgtatctgtaacactcttgaaggaaatatgccaaaatattcacagtagttatagtttattagagagattatgaagaaatatttttctttcctcttttgattttttccaaaaatttcacaatggcacacaatatagatattaagaattattataaggtcaggcgtggtagctcatgcctgtaatcccagcacgtcgggaggctgtggcaggtggatcacttgaggccaggagttcgagaccagcctggccaacagggtgaagacccatctctactgaaaatcaaaaaaattagctgggcatggtggtacacacctgtaatcccagctacatggaaggctgaggcaggagaattgcttgaacccgggaggtggaggttgcagtgagttgagattgtgccactgcactccagcctggatgacagagacagactctgtctcaaaaaaaaaaaaaattataaaaagtcgattaaaacaacaacaattttaaaaagagggcaggaaagtggtctagtgcccaagagacctgtctcagcattaaagcatccatttaataacggtgtaatcttggctttgttatttagtttctctattcttcagtttcctgatttgtaaaatgaaattttcaggtgactgcctttcagcactcacactcgaaggcacttagtaaattcggcactcatattctaaggcactaaacacatgtgtctacttatgggagcccgaacatgagcctctgtcaggtttatggaggatgagttccagtgggaaagaggcttcctgagtcacagtgagcccaggagacccggcggcggccgcaccgggacccggggtgtgtggagacccggcggccacacctggacccggggtgtgtgggaggctctggaagagccactctgtgtcccaccctctcactttccctcctgctgaagaggcctcagtgcccggcgggtgcacacaagcggcgcagtccctactctggcgggaaacacaggatgtgaaagtattttatgaaacagtttcagtgaagaagaaagtgggtcattttctaatttgaaaaatccagagtcttctatttttctttgaaatttaaggagaagcaaagtgcttttaaaatgtttgcgtattagcataaacgattacaaatatttgtgtgtttcctggtcgatgaaaacacgccgctgccagcaggatgagatccgaatgtgaatggccacacttcagcaggagtgttattccaccagcgggagcgttattcccccagcgggagcgttattccccttcccgtttcctgttccttggtgttgactttaatgcatatgttcagatacacagaggaatagaattgtcaaactcggtcaccagcaggtctctcattattagaggacaccctgatccaggacagcagaccaagggtgcttagtttttacactatttaatacacagattattttcatcaatgttaagactacagcttcctgaagtcagaccccaggccttttattggtacctacacacccggggtcaggtgcagcctgcacatggcaggtacttgaggaacacctgtggacaagctggaagagtccggtgggaagggttttcagtgacaagcataggaagggttcgtgacacctgttcctattacagacatggggaggttcaaagtgaaccagtcaggaataatctcagcctcaccccagaaggaatttacaaatgaggaccatatatggcatggactagagggtcatatcaacccacagactgtggcattcttggttccattccccactatttggataaccttgagcaaggtagtctttgagccctgaaatggtgaggaacatgcccttagccatgggatgctggcaggtcattgatactgtcctatctatgaacggggttttcctgtctttaaatggggtgatgaggccacctcgcaaggcagcatgcagagaagcaagtccacacggcagacactcagccagcgcagcgcccagcacagacgtgctcagcagacgcacactctcagctctgacagccacggtgcaagtcagatgcaagcctgcaggctgagccgggcagtctcctggcctcaggtggacctgcagtcagagacagtccctcccttctgcggcatcctttccttcctgtgtgcacgctgtagaatagcgggctgggggtgtttaagaccagaagcagaaaactgacaactttgttgcctggaaaaaataaggtggacaatactggaactaatggcagaaacaaggttttggagcaatctacaatttattgaaagcagccctgagtcccaggactaaaataactaagaattggtttggttttattatttcttgttaagcaccatgtctgaggttaagacccagttcttaaaagtaatcacatagatacgtgttacacacatcagttcagttgctaaccagcccatcagcttggatgtaattacttcacacgttctctgagaatgtgttccacacataaagaatttccataatggccaggcagccttgagtggaaacaggccacagttcgggcctgggagagaagtctgcaggggggagatctgtggtcatgccctcaccccatccccagggcagacgatgccgcttctcagtgaggtccccttggcttcctgtcacagcacctcggtgctagtccacccgggagatgccagaacagggctaactcgttcatctttccagtccaatggccggggttgctacatttctcaaacttaatttctatcattaaatccttttgttttgttttatttttggacagacgagttctccctatgttgctcaggctggtctcaaactcctggccttggcctcccaaagtgctgggatttataggtatgagccactgcacccagtcattaagtcctaattacatgttatttgccctgttcaagttcaagcagtattttttttaataaagattattcccaatagatcttagtcttcatctgtaagaggctgttgagggcacgaccacctcgcagtgacctccctctgtgtgggacccccgttcccactggcacaccatggggacagctgggtggggtagtgttgagttctggtcctggtcccaccgacctgggctggagctcccagatgctccacacacccacgtctacagaaacactaggccagactggggtccgccccacacgcacagaggatcactgggggcgatgtagagatgtggaagctggaccccaccccccaggctaattcatcagcaagatgttggcaactgctgggctggatggttattagcatattaggatgacatttgaccctaacattccagttttgtgctaccaaaaaaaaaaaaatcacctgaatgagtcaagacagttaaacttgagggtgatttgggaatgaggggaattcatccatttgaggttaaatgtttgccaatctaatttggtcaaaacagttcatccacaaccccgtgcaggccacaacacaggagcaggtgcagcagggcccttgagtctgtctcacgccattaacaccctgtgatggccttacttggcgtgtggagctgtgaccaccagggccaacctgaggcagcatcatggacttgaccgactcacctcagagcttggcactgggtgctctgattcccttcctcaagcttcccacttgaaggttggtgtgaaaccccaccccactcaaccctggctgatccccatggcctgttctttcgacgatcctcctcttgccccaatttctccaccgcacagactcgccagggctttggtttgtgagtgccctgcactctgtcagttgggccatggtataatttatgttcaacagagacctttgggagtgagtgtcagtgccgtagcggaacacagggatctgaggcacaaggcagggctgtcccaggcaaacagggacaccggccccttcatcagtaggtgacatgctttcattcaataggaaattccagaacaccaagaaagggatctccagacagggacctgaaaacaggatatggaggtagatttgtgggagagagttggaaagggagctagcactctttgagtacccactttgtgctaaatacttagtttttgactccatatgtatgaagattaccatatttcatcaatttcaagacgaaccctttttcacagtgtaacccctctgaagtcaagatgcctcttatgaacactggcaagagagtttagctggagcatagccctttcctgatagcacataaagagacggtgcccctcaccagggttcctggcttggactggacagacgacagcaccgcaagcatctcaccatcgagagactgagccttcccaacaccatttggcattcccagcttacacagctgagggggtgaagcaaggttcaaatcaaagtcagcactaataaaaatttctaggtttccaaccctacacacccatttgggtcccactcaaacatcaccacagggtggctctccccagtcacccctcaggcctggcccagtgccatgagaactgggacctcaggagggtcagagccccagcaggttccagctctcagatcaaggtgttcttttcttatcatcttctttcttctctttcccctctcctaaatcactgctcactctctgccccacacccaactcaacatttagatgctcagatagcatttcagagtcttattttatgactttctgaagaattgtgctgcttcaaaaataagagccccctcattaccaaaaacttaacccaaaagtgcacttcccaaaatgcctccaaataagtgtgggaaatccaggaagccctcgagagccactgaacgcctctgtgcccagcactttgaccagcaccgtggaatcagcttcccaaagcatgcatggggcactggaatcccagtttcacagacacagagacacagaaagcttgattcacaggcaggtgccaggagaactgcagttttatccctgtaaagtctaattccaacaggagtactcagccacattgaacttcttctcactaagaaaagttatctcggtggcctataaactctttggaaattgctttgaaaacatgttctaggctggtgttttattatttatgaagcaacactgctgtcctggtttaactgccttcctgtgaaagaaaaggcttcctgttttgtttcctgagactcctctttctccttcatgtcatcaccatcaccaccatcatcttcattaccaccatcatcttcaccaccaccatcattttcattatcaacatcttcatcaccatcattaccatcatcttcatcactatcaccatcatcgccatctttatcatcacctttatctttattatcaccatcaacatcttcatcaccatcatcatctttatcatcacaatccccattatcaccatcatcaccatcatcttcatcaccaccatcatcttcattatcaccatcacaattatcactatcatcatcaccatcatcttcatcattaccatcactactatcaccatcaccatcatcatctttatgatcaccattatcttcattatcaccatcaacatcttcatcaccatcatcatctttatcatcacaatccccatcatcttcatcaccaccatcatcttcatcaccaccatcgtcttcattatcaccattaccattatcaccatcacaatgatcactatcatcaccatcatcttcatcaccaccatcatcttcattatcaccatcaccattatcaccatcatcacaatggtcactatcatcagcaccatcactgtcatcaccatcatcatcaccatcatcttcatcaccactctcatcatcatttttaaaaaggattgcattctaaaaagttctgtgtttgaaagtatatttgttttctttggctgctgttgtaacaaatcaccacaaacttagtggcttaaaaaacccacaggctggctgggtgcagtggctcatgcccataatcccaacactttgtgaggctgagacaggaggattgcttgagaccaggagtttgagaaccacctgggcaacatattgagatcctatctctattaaattttttttaaaaattagccagatgtggtggctcacacttacagtcccagctacttgggaggaccccttaagcctaggaggtcgaggctgcagtgcactgtgattgtgccactgcactccagcctgggcgacagagtgagaccctatctcttcagaacaaacagacaaacttattgttctgcaggttagaagtccagcccgggtctcactgggctgaagtcaaggtgtcggctgagctgcactcctttctgaatgcggatgacggtaaatgggatggaaggtgcaggtagagactctgtgtggcaggttctatctcatttacgtggctgggagttgtaaatgccatgagtttcttctgtttgttggaccgtaaagcaatggaggagtgggtgaaatctgactgtgggctgagagggctgtgtgtccccgtcctcactcagaggcagacaaatactccatgacatggggaaaaggagaacgatgctgacccattccacaagtcatcaactcgcacaagttatgtatgtgcagtttactgagagtcagtcatacctaaaaagagaaaaactcaacaaacaggagggtggacattgaaaagtatctggctgaccctctgtgagtgaagatgtatttaccttgggatgaatgatcaggaaaaataaaggctgaatccagggagaaggggtctgggcagccacaaagctatgggacacaagtccatggaggtccaatgagctcatctcatgcacggttctctttttgtgatgaacaccagtgtgaccagtgtaaatacaatattagttggatcatttgttagtaacatacctttggacactggcttcattcttcagtatcttccctttatagacttggctttctgggagctggatgtttacccagtaccacctagcactagtaaattactacagcggagggcaggggaggacccactactccaggatcatttgtgggggtggcacctgactcaatattaaaaaaattcacatggtgttttatggtttacaaggcagccttgaacatctgacaccatgtaacaagcggtaactgtgagaagtggggatacaggaccaggccttctctccaaaccttgaggttacctttcctaggaatgcagagctttcagaatggtgtccattccactcactgcatttcagcctctgtggccttgggcagcacctgtgatgcctgtgctgactggcatcgtctgcagtaagtgaggagggcacagagccttccatcaatctgttcagggcatgatttgctgcaaagtgagttgtgaaaactttcggttttcaagagtttctgggtctcggggttgtgtgaatggatgtgaaccagcctccttctgtttttccaggggatctaacaaggctcgaacgctggagccgcatgtctgcgaccactcagcaggtgccggctggggctgggctcctcagacctgaaacactgacttctctatttggcacatctccagggtcatccttgcagatgaagaatccagcctgggtgtctcctgacccatcatacagcctagaagggtttgtgttttgttttttccaagtaaattcctgctatcattttacttattttattgctgtgtgtagagtgaagaagatgctgaaaaaaaagagtgagagaaaaaaatcccgttgatcctggtagatgggatatatgggaactaattttatatccatgcatgagttaaaacgagcagtaggcacatttcccatgggcgatggaagtgacctctgtcggctcagtggaaggtgccgaagaaacagcaagagacctccttgtccaggtagccacaaaggaatttccttttgaaatgtatactcgttgaaatttttaatccaggataaattatgagagtctgtactgcacatgtcagatgctgcacatgaagggttaacatcttgcaatatccatggcatcaatgtttccttttttttttcatcttgctctgtcactcaggctggagtgcaatggtacaaccatagctcactgcagccaccacttcccaggctaaagcgatctgcctgcctcaacctcccaggtagctgggaccacaggtgcataccaccatgcccagcttatttctgtattctttgtagagacgggatctcaccatgttgcccaggctggtctcaaactcctaagctcaagtgatccacccacctcagcctcccaatgtgctgggattacaggcatgagccactgtgcctggctgccagtatttcctctttgcacacatcctgcacttgtcagtggccacttgcccacctctgatttctcaagtgaaatcatcatgagaagggcatgagtggggagctgggaggtggtggcaggctgggtgctgcctgggtttcatcagaacctcctgaggtgggggccaggggtagccatggagttgggagttgtggaggaggcgagatgcttggaaggaagctgtggacagggtctgaatgggggtggctgagcctgaagctggagttgagtcctggtgggagcagaaaccttgggcacctgggagtttggcttagacagattgggctgtgcatggtggagaaaggcccaagcagaaaagctcctgaacaggcctggagcttgcacaggagaaaggctggagtcacagacctggatgttgactctcctgatctcctaagggagagaggagaggaagaaatgaacggagggtcttgggggaaattccccaagaaataagtgagtagcaaaaacaaacactgccagactcctgaggccaacgggatccctgaaggtgcagggacttaacacagccaccaagaaaatgcaggtgagaggatgagtccaggaaaaacatcactgggctggcctggggaaattggtggccctggcaaggaagttgcagaggctcagttccaggaacacacagggaaaggtaaaagacatttgtttcccacagggccagggctctaccagctcagttttgtattagacactggggccacactgttggaaataataatttagggataactgcacaatatacttgccacctttgccctatgaactccccaagagctcaggacacacattgagaaacaccagcacacaagtacccaaggtcatctgcaggcaaatagaaagcatcgtggaagcaatgctcattagacccacacactgtcccaggtgctctgctcagcagaaccgggggacagagacagcatcccaactagcagggaggtgacaatcccaggggaagaaagaaggggaaagtctctattccagcacaagggtctgaagtcatgaaaatagagcagagcagggagtgaagctgtgccagagccacgctgatggcgtcctcaccattggtgcgggtgggtggccagatgcagctgcgcagatggcaggggcatgtttcctcctctcactgtaactggcagcagtgtgcttcattgtcacgctcagagcggacccccccccccacaggttgcccaccccagggcaagacctagatcctggtgagccttggtgggacctgtgcccagcacaacacacatggacagcccagcaggggtagctgtgcagccagtggagtggcttctgtgcccagcatgccctctctggggctcattctcgtgtttcctaccctaattctaagctcattcttcagagctcacagtgcccctgacactccctggtccccctctctgcccagtgaccaaagctggcttgtccctgcacgcacgaggcaccactccatcacatgacttccatctgcctggcaaatctgcaccatttttggaagcagctgaaatcccatttacccagtaaagtcagctgaaataatcctagagaaagttcaccacctcttcctctgcctgtgcctctatcacagatttaataacacacccttgtaattcatcttgcttatgtgggtgttttctccatgagttcttcaagaaaagagctggattctgttcatctttgttcttacccctgagtatccaactcagagctttgtacatactaaatatttgtacttgtactgaatattttttggaatgaataaatgcatttttgaagcatcagaccttcaataaaaaaggttatttttttcttatccatcacgaatccgtatttgaagatttctggaagaaaaatgaatcagaaaattcagaatatccaggtgagtctggggatattccaccccagtgcagcatagacacacctcaggacagagaaattgaagttggtggggtttcttaaagctcttgctgtaatgagcgccacttggaagtaatggcttaatcgttattaatttctttggtatttcctatgataacattaatcacagcaaactcatttgatgtaatggagaccaggaacccccctggaacgttccccagcaattccgtgctaattaactgaagcatcttgtaaaactgccaccctgttttacgattaagtgcatttcttgcacactttgattaagacacaaatcccaagccaataaaaaaaaaagtgggaaagaaagaaagaaaaaaaacccaccgttttagaatgcagtaatgagagcattggtaaagtaacagagacttcactgccagaggcgacaatagctactacttgaagtgaagcaaaaagaactccccagggatggtgtagactgagaaaccttcttctgtaccttaatttatccactgcatatgtacagaagcaattttaaaatgcatattaaacactccagtgaaagaaaagagaataattcacaaagatgtcagttctgcatacccaagtgagaactatgaaagcagagagtcctatgcaaacttatatcaaggtatggaaaacaccttttaccacttaaggtaaatgttcaatttccagagggcaaatcgtgcgctgcctcattcagcagcagaatttttctccccaatgattggcatttggctatcaaggcagaagaaaatggagcatatcacaagattgcacagcttggaagtgtaaaaggcgttcactagaacaggttctctggcacccagcatgccaaggtcctaacgaaaatcgtgtcaaaactcacgtcagtcattctgtgttttttctccactggttcaaatgcacatcattctaaggatgacagacacatgcagaggcacctggaatgaggcaaatgggacctcgggtcttaaaggatgaaaccagagcacatgggcattaacctgctgactgacagcagctcaggacgagagaatgcctatgtcacccaagagaagggggtccaggccctgtgggagagaccacaggaactccacaccacgagagcagggcttcagagaccacgggaactccacaccacgagagcagggcttcagagaccacgggaactccacaccacgagagcagggcttcagagaccacgggaactccacaccacgagagcagggcttcagagaccacgggaactccacaccacgagagcagggcttcagagaccacgggaactccacaccacgagagcagggcttcagagaccacgggcactccacaccacgagagcagggcttcagagaccacgggcactccacaccacgagagcagggcttcagagaccatgggaactccacaccatgagaacagggcttcagagaccgcagaaactccacaccacgagaacagggcttcagagaccgcagaaactccacaccacgagaacagggcttcagagaccagagtaactccacaccgtgagaacagggcttcagagaccacaggaactccacaccacgagagcaggcttcagagaccgtaggaattcacaccacgagaacaggacttcagagactgcaggaactccacaccacaagaacaggcttcagagacctcaggaattccacactgtgatagcagggccccactgaagccaggggtgacataagcctgcactctgggctgcagcggcctcactggcctgcaggagaggccccatgagatgccctggagcagcagtgggtgggaggaggttgtgcaggggccttcgagggatgaagcagctttgctggcagttttggggaagacagccctacttggcctgcctttagttcatgggctgataggacagacacaggatttaaaggccaaatagaaccacataaaacctgcagatgtaaaataacaaatagcatgctgtggggaggaatggggaaagggtggggggaaataacagggggtaggctcttcaatatttaaaagttccagacatccacagacttcttatgtcattttcctgatgggagggaaatgaatttccaatatttatatacaccatttaaataattttgctaaataatcagaggtcttagagaaagatgtgcatagagccaaacaagctgtctacatgagacacagccacagccgggtggggcttaccctgtaaagaatatccttctgcacagcagaggatggcctcactggattagatggctctccttgaatcaaagccctaattttcaggtaatggccaagatataagatgtaaagcactgttgtaagatttttaaaatctgtactattttttgtaatggcaatgtaaaatttaaaaagatgaaagcatagcaacaaagataaaataaatagcatgcttttagaagaccacgcggcatggaaagcagtctctagcgctgtctttcttccgttagggtggactggaaccacagggtatgaaaagtggcctctcgcgctgtcctccttctgttggggggactggaaacacatttctccattcattgtcagtggtgttacaagccattggtgagcttccttccagagtgaatgccaaatgatacatttatattagatctctctgaccactgctgttgacgttggcggggtagcaggtgtggccataacatggagcacaggctgagctgcctgacttgcactgctggacggtgggttggcggtgttgacgctgcacaggtcatgagcgccggccctgcggatccggcgatgatcattgtggaaagaatggacagcaccctggttgatgtgcagagtgaccctgcagtcaagtctgtttgcctcccactagcattttctcatctccagcacggtgtcaatggtgccactccagccgggccaccctgcccacaaggtcttccacggggctcctccccagctcacggggaaatcccctttaatttcaaacagggcccttccacctgcccttgattccctgtggcaccttgggagcatggggctgccctactgtggagttagtgggtccacttcgagaagacagagacagagtgaagcctcaagaacagtgttcactggcagtgggaaccgtcggtcctgccatgggacgatgtgactgggggctcgtccatgccttgtcgtggacatctctggtctcagccggcaggggtgggtgggacctcagacctcagcgggtgatggcagtgggagcctgggcaggggcgggcagggctctgtggtaagacacagagggcaggggctggggtgggcagggctccatgggaagacacaggtagcgggtcaggtgctggggaggtgttgctgggcatggtggatttgcaaatttccagggcggtggggggtctggcaagtgtagacacagggcagaagtgggcgcagtgtctgtgggtgaagagctgtgcgggcgggcactgagaagaggtgcccacgtccatccccagcccctcaggcatgttcaccatcatggcgcacatgtctgggagtgagcagaggaccagggtatggaacaagccctagtcagaaatgcctcctgacgcctgtgacctctgggcagggctagtgaggggctggggagagcagagggtgtttctggataagaactcacactaaaggcctggcccggaccctgcctccatcagcagggtgcagcccaggcccagcacattctcctcctcctgggacctcgatcttggcttcccctaggcctttctggggccccccagttcctgccaacactgctgtccacgctggggccctccagttcctgccaacactgctgtccactctcttgtccaccccatgattccaaccactggatccgagcatctgcaccctgtatccgtttctctaacccagatttccttcaagtttcaatcctgtactttcggataaggactggatgccagcccctgtctcctcatgtctgagagcctctccatctccagacaccccaatctcctcgtccctgtgatgtcggctcaggtcaccattgtgtcctcttgctctcctgggtcaggcacctaggagtccctgaatgcaggcaaatcattcctcagctgtcagctattcatattcccacggccccacgaggagacgtgcttcattctacacaaacttgggcgagctccctagacccgaactgtgcttttcagtgagtgtcacagatgtcacatgggtgtcagattcaaggatgaggccagcccttggtgccaggcttggcataaatcagccccaccagcccctgcctgccctccgtgtctggtattcatgttcaaaggagtctaaaacctcactgtcttttccatgtgaatttacctttttttttttccattgcatgtcctttaaataaccaccaggtacctactgtgtgccctgggcactggggatgcagagggtcccaaccacaatgcctgtctgcaggagttcccagggtggaggtccagctgctctgagcctggtccaaggacagccacaaactagagataggctttggacaaagcagtgtggccgaggtggggtgttgtaccccatgcgatgtggagagagggaacttctgtcgaggatggcagagcagagctgggcagcagcccagcacagggccctccctcacctgagtgctcaccatccaagtccttgtagcacaaggtgagctggaagcaaaagccaccccagctcagatgtcctggtgaaacgccgggaaaggggcctcagccagggccatggcagcttagggctggttcccatcgcgttatcagcaaacgaatcttcccagaatcaagctctgatctttcttctctgatgtgaggtgctcggcgattcccaggaggcgctgatgagttgctcagcctggcagccgagttccagcagagttgagacccagcggctcctctggctgttcctgtgttgggcattctcctgctcctagcaccggctggcactctcctctgtggcctctgttctctttattgttcagttatgaggcttcttcctcagttccatgggttaaaatccagatgcaagccccccccaccaattaccccttcattctacagagttcccaggttctcgcccactctgcccagcaccttactggagcctccaccatgaggcctcccgtgctgcctcctgggatagtcacgcatgtgcctgtgcggctgccctaccagaccctggggcctccaagatcgcaaactggtccatccctctccctgcctccagcgtctgccgaccatgcttgcacgtagccgtggacttgtgccgcagattggggtaaataatcctagagcagataactaaggtacactcttcaaactgtaattcatcacaaaactaagtaatattttgtttttaaatgtacctaagcccatgttgtcttgttgatattaaactgtgggggtatagaggtgtggtagcattttactaagtcacagaggatataaacacttctgcttaagctcccaaatcgtcaaagccaggcatagtggaagagaagttgaatcaaatcgaagtttattaacaaagatagctgtcatgccaggaatcgttatagatttcgtcaaatttcagaggtatatgtaattatgaaaagccataaacacagtagtttccatgaaaaactatgagtaggtatggaaaataaaacagatgcaagggtaggaaccacagctaatagtccatgaatctaataattagttaactgattaacgaaatgcatattcattaagcacacctgtagagagcctattgcgtacaggtgccgttccagcaccggggactccctggtgtgacccacaggtagggtggctgtgccccatgaagcttgcatggaactcaccatctgtggtggcactgatccaaattcaatgaacaaggtgatttctgatcagggctctgagctctgcgtcaagtgggaggggttaatgtgctctggagtgacaggggtgggaggggtttatcagagatctgggagccaggaaaggtctcctgaggggatactcaagctgatgcctgaatgccaagagccacctgggcaaatgtgggattgtgcctggcaggtggagggcccagagcgtgcaaggccccaggtgggatgacgtgagtgtgttcatggagtagtgtacaaggccccaggtgggatgacgtgagaaggccccaggtgggatgacgtgagtgtgttcatggagtagtgtacaaggccccaggtgggatgaattgagcatgttcagggagcagagagaatgctgctctgtccagtacctgtgagcaggggaggtgggggcgggaggaagtgagaggtaggatctggtaccatctcgagaggctgcagcagggacacttgaagatctagtgacacctaagagctccctgttgctgctgctgggggagcaggaagggggatcaccctgacaagactggtggcagctgggacaagagtcgtggctgaggaggagggaaggaggtcagcttcccgatgtgtctgtgggccggcaggactcaccgccgcaggcagcaggctcaggcacctttggtaactaggcccacaacagatcctgaactccctgtacgtcgcatgcacatctacagactaaataccaaggagttttctaaaaaggccaatgacaggtcaggtggacctgaattgttaccactaattaggataaaagaggtttacagatgccttgggccagggcagtttcccggaaagtctgaaaccagctctcaggtgtgttttgtggaagacacggctcctctggcacagggctgtgaaactagctctcagacatcggtgaaactctgcctgatctgcttctcaaacagctcccgtgtggtgctgccgccatctccgccgtcaggagtggctttgcaaagacgtcttatgctgaccgcatgtcttttggcctttcttttcaagagccaaacacttcctcctagacaagacacagcaagatactatggcttcacgtccttcctaagcaaagccagggaccattcgggaaattgtttagcaatgctctgagtcttttactcttttgaaagcttttgagctcaagacagtttctggcaaggcaagtccattcattcacacctaaagctacagcatttgtgaaaataatgaaaaggtcttaatgctggcatctttaacaaacccttcaaagtcacaaacactcatgaaagcagaagccagaactagactttgctcagaggtgagcagctgatccagctcaggggtccccagtgatgattctttctgaacaagagtcctcagctcccccacttccctctgggactgcacactttctgttcccttcctcaagggaagccttttcccctgattttctgtcacagtgaggttgcattcgtggtgaagtcggtcctggttttggggccaacctcactgctcgtggggctgacagacgagaccccaggaagcatagcgccatgatgggagaaagacatcccctgggccttcctggcgactcacaaggctggatgttcttgtctacgacacctgcccagcggaaggcccagaggggggtggctctctggagttgactctgcagagcactggcaaggccaggatccagagctgcatacaccaagggccgccctcccccaggcctactgcacctgcttggccttgcctacctgccatctcccatcgcccccgcggccctggcaggagggattgtttctctttctgtgtacaaccagaacctactacagggcccagtccacagcagatggctaatgaatgtctgctgaatggatagaaaaaaaaagaaaaatgttttaaatgttcaaaatacctgaaggagatgagaggacattgcttaagttatcagggaatgaaattcccaatagaaagacatgctaactctcagtttagaaaatattatcctttaatccatggttttctctggaaaaaccaccaaagttaagaacattccacatctgagaaaacacttcacgtcgctgtggctgcagcagcaatggtggtgatgacggtgacactggcaactgcacgttgctgagtgtccgctatgcactggtcatgattctaagttctcacatcacatttaacacatgacagtcctctaatgcagacactatgggagcccacattttgcagatagggaaactgaggcagctggtccagatgacttggtcactacacagaagagccatgcagcccggctccagagcgacgctgcctccggttcctttatctacctctggtgctcccggtggctgacaacgcctgcttatgtattctgctctctgcagggggtgccgctgaatgccggtccttggaggtatgggctggactttatgactcgcatccgttgcatagaatacagtgcgtgatgcacaggcataagaggtccctcagcttcctgctcaatcgcagcccaggccagcaagccaaccataccctcatgtgagtcccagagccagagcccccgactgggcagctgggggatctgtgacaacaggaacgaagctggtgagttcggggtagtgtgttgtatagcatcagataactaatagagtctatttcctcagcaatacaaggatcccccaaaagcctcataaagataatcactgaggactccttagtctttgaaatgtaatcctcatttcattaagtttcagtgaccatcacattttgatgacttggtaaaaattcagtactgatggaaatcatgaccatattattacatcactgaggtttctctgcaaaacaggaacttgttgatcagggtattcattttatgcaggctgagatgcaaacttcataggcaggctgcacaccagagggtaattcagtatctctgcatctgagtaagaaagttcttaaaccactgtctctttttatgtcaacttacagggaagaacattctccaaatatcttagaaattcagtcaagtgtttcaaagccaaactaaattactccagctatttgtcggagttggaaaagaaacttctaggactgagcagccataagatacagccatagataccctgtgattggccgggcacggtggctcacacctgtcatcccagcactttgggaggccgaggtggggagtcacttgaggtcaggacttcgagaccagcctggccaacatggcaaaaccccgtctctactaaaactataaaaattagctgggcatggtggcacgtgcctgtagtcccagctacttgggagactgaggcaggagaatcacttgaacctggctgggcggaggttgcaagtgagccgagatcatgccactgcactccagcctgagcaacagagcaagactccatctcaaaaaaataaataaataaaagatactacgtgattgtattagcatcacatctgcccacagccttggaaagtaggcagacgctcctccctttaagcctgaggaaacccaggcttaaagaagtgacatgatcagccagttcccaccaagccccacctcccacacgggcactggggacaggggagggataagtagccagttcccaccaaaccccgcctcccacacgggctctggggacaggtggggggtaagtagccagttcccacggagccccgcctcccacacgggcactggtgatgccctgcgcactctggctgtgttgtcaggcactcacacagttagatcagtaacttgcagaaaggctcctcatataccaaagttgagtggataaacagccttttaccctaagagtgacctcagagtttgcaagaacccacacatttcttggtccttatacaaattcagaggaactgcagacagtggtgtcaccagaaccatttagacaataatgtgtgtggacgagacatggagaaggcttccatagtcggtgatgctattccaggacaggtgaaactgctcaaactcctgctattccaggacaggtgaaactgctcaaactcctgctattccgggacgggtgaaactgctcaaactcctgctattccaggacagatgaaactcaacttcaactaaaccaatcaatatattcaacacaccaacacacacacaaatttgactccagtcattgataaaatagtaaaaacaatagtttctttcctgttttaaaaggagcttttccctttcattcagttaatttaacagggagtgattccatttttttttgtagtaattcagtttactttattttaaaaaataactcagtgtaccaaatgatttaatgacttcaatgtatcaaaattttattggctcataacctacatctatttcataaaataaggtttgatctaaaatgacccttgggcgtttccaagttaattaattagcaatacttcggaaaggcacaagctatgatgtgaaggctttgagttaatataacaccagttccctatcatatcagcccattcttcaagggctttgcaaagcagcagttctccaaatgcagcccttacgccaggtgccacctggaggttgttagaatttgtagaatgtggggtccccccaaacccctgagtcataaagatgaggaggggaatgcagagtgcagggtaccgcccagaacccctgagtcatagagacaaggaggggaatgcagagtgtggggttcccccccaaaccccaaatcatagagatgaggaggggaatgcagagtgcagggtcccctctaaaccccgagtcacagagacaaggaggggaatgcagagtgcagcgtcccccataaaccccgagtcacagagatgaggaggggaatgcagagtgcagggtcccccctaaaccccgagtcacagagatgaggaggggaatgcagagtgcggggtccccccaaaccccgagtcatagagccaaggaggggaatgcagagtgcagggtccccccaaaccctgagtcatagagccaaggaggggaatgcagagtgcagggtccccccaaaccctgagtcacagagacgaggaggggaatgcagagtgcagggtcccccctaaaccccaagtcaaagagacgaggaggggaatgcagagtgcagggtccccccaaaccctgagtcatagagatgaggaggggaatgcagagtgcagggtccccccaaaccctgagtcatagagacgaggaggggaatgcagagtgcagggtccccccaaaccctgagtcatagagacgagtaggggaatgcagagtgcagggtcccccctaaaccccgagtcacagagacgaggagggggatgcagagtgcagagtccccccaaaccccgagtcacagagatggaggggaatgcagagtaccgggttcccccctaaaccccgagtcacagagacgaggaggggaatgcagagtgcagggtcccccccaaaccccgagtcacagagacgaggaggggaatgcagagtgcagggtcccccctaaaccccgagtcacagagatgaggaggggaatgcagagtaccgggttcccccctaaaccccgagtcacagagatgaggagggaatgcagagtaccaggttccccccaaaccccgagtcacagagacgaggaggggaatgcagagtgcagggtcccccccaaaccccgagtcacagagacgaggaggggaatgcagagtgcagggtcccccccaaaccccgagtcacagagacgaggaggggaatgcagagtgcagggtcccccccaaaccccgagtcacagagacgaggaggggaatgcagagtgcagggtcccccccaaaccccgagtcacagagacgaggaggggaatgcagagtgcagggtcccccccaaaccccgagtcacagagacgaggaggggaatgcagagtgcagggtcccccccaaaccccgagtcacagagacgaggaggggaatgcagagtgcagggtcccccccaaaccccgagtcacagagacgaggaggagaatgcagtgcagggtcccccctaaaccccgagtcatagagatgaggaggggaatgcagagtactgggttcccccctaaaccccgagtcatagagatgaggaggggaatgcagagtgcggggtctcccccaaaaccccgagtcacagagacgaagagggtgctgatcacatcccaccccagcttccaggtgcttctgacacagctgaaacctgaacccatgactttcagggctgtggcctcccccgcccccgcccacatgtgtccaccagccctgggagtgagtctgaggcagggattctcagggacgctgcctgcatgccccggaggagtagcgtgtgtgtgtgcacacgtgagcttgtgagtgtaggcttgagaccgtgctgccgacccagtccctggaatccctgtgctgagttgttctcatgtggctgctggcccagggaggagcgttacggacaactgttaagtggaaattgtctggacgtaatgcagttcatcagctcaaaagctgtgggtctggctgtgtgagccaacagcgctagtgtcctggtgcctggacacacggatgttctggggctgttgctgaaactgcggcacagtaagccctgcagcctccctggaatccctgaggaggagccggctcacccagcgccgcgagcatctcttcctgactcgcagggggcccgtgagatggagaatctgcctgacagggtgcacttgcacagccaagcaccaagaaggaaaatggcatttcattagccatggagacagccgggaacccagcagccttctttattctggctcatattttctcatcattctcagggagttgtccaggtaacaatgaccttgtgtaaaccagcgtccctgcctgagtcctcttcacctgaaaccaccgccccacgccaggctccacctccccacgccaggctccaccccccacgccaggctccaccccatcccacgccaggctccaccccatcccacgccaggctccaccccatcccacgccaggctccacccaatcccacgccaggctccaccccccacgccaggctccacccccccacgccaggctccaccccatcccacgccaggctccacgccaggctccaccccccccacgccaggctccaccccatcccacgccaggctccacccaagccagcggcaccggttctggctggaaggttcccaaacctaggccagggtgtgaatgccaggggccctgtgagtggtgagtgatggttgctgggtgctgggggctggcgctgttcccgccgcgccctccatgaagctgactctcagtcctgctctctgacaccgggctgtgctcagcagccacgagctgaccacgcggtgaggctgttcacttttctccctgactccagctctccccacatgcagctcatccccgacatgggctcttatcccaccaaccgcttctaaagacctgcagaagctccctagtcacaggacgtggcgagcccaatactcacgtctgcccctgacttctgcactaggccctgcctcagccactggcctcctgcccctcactgtcggcctcaggcccaggctctctgtgtagaggcctcctggcttccccaccccgtgctgctccccacccggtgctactcccctggctgagcgcccacacttctttccccttttccaaatcccacctgcaggtggtggtctctagcactcctcttggttcatgggccttgactgacagctttctcctgcagccatcctctccacaattctgggagcgtcgactgtgctcactcaacactccctttaacaaagtgacatcagatgtttgggccctacttgcatttaagccatccagtgcattccacataaaaagcgtgcacctggaggaaactaaataatcacaaccaatcactctttttttagaaaaaagcagcagctctctcaatgtagaccaatttatcggtctaaactagagagaccgggcaagccacttccatcttgcgagtttagcatatttgcctgttgacacctacacttggaggaagccattctgtgtgtgtggtgtgccttcacaagtaatttctatggaaaacagccgtcagacagtcatcctggcccaaggtgacctcattaccagaatttgttctagttgtcattagacatatcacactatgtcactcaaaatgggaaagaaagagaagatactgacatgccgccccagtgattagagatgaaaatgtagttataccatatatgatccctgcttggagactatacggatagggtttaagattcaggcccccctcagatccatcactgtggtcctgaagcctctgtccttcttctgttcttttaaacttctctgtgtagatacagcaagtgtgttttctactcactgcacagccagcgctgctcttgaacaaactcctgagggaggtgcacggaaaccatgcatccaaatccggagagcagggagaccagccggatagcccacctggctgacgagacccggcctcgctcagaaagctcctccaagatgccaccgcgtgtgaaatgcttggggttgaatctcgagagcagggagaccagccagacagcccacctggctgacgagacccggcctcgcttagaaagctcctccaagatgccaccgcatgtgaaatgcttggggttgaaatgtaacgaatctctcactactgacaagagaaaggccagaacacaaacacacttcctgcttccagatggatggaggtgggaggagggaggggttctgaccatcttctctggtgctcagtgaggcaatagcatgagatagataccctcatctacagccccgctctcgtatgtccgggggaagctatggagagggtgctgcaaagctgccagcaagtatgtctgcctctgacgagtcactgttggatgtgaggcaacgtgaaggctccaccactaggacccaggcaagactgccaagcggatgaggcttcgctttaggaccatggactctggcggcagataatggcctgagaggtcagctagtccaattgcttccttgtagacacgcagaaactgacgcccagagaggcagggcaccccgtgtgtggtcaccgtggtcagtggcagaggtggggctggaggtcagaactggctgcatccgtctccatctccccaagcacaggccatgcctgcctctcccaggtggcatctcctctctgtggtcctttccctcctgcctgcctttctgcgacatctgcactattcagacatcacgcttcctttcgtcctcactcaaaattcccattcactcagcattaccacggtttgatattaggactgcttgattcaagccaatagtgctaaattagaaataatgaaggcttcactcttccacggggttctgcccttggaagaactaatgaaacccaaggaccatccagttggcaggactggaagtaactgggcagaggagacattttggagcaggtggtcggtgcccacccactgacaggagctgccggtttctgacccactccacccctcctccaggaccctccagagtgaatctggagcgagggggcccagtgactttggggtcatttgcacggtatcagctatagccgcagtgagagggaggctgctggacacgctggggttcacctgtgtcccaggagaaccccgctttaggatataacgggttcatgcactggagtagctgccggtacacatctagggagtgatgatccccctccaccagccagtggggaatgagcccgtgaaggtcacagccagccatgaaacagctgcactgccccagcacgccgcccacgcttggtcggcaacacagagattccatttcttcctgggattaggaagcacgaagtgtccagatctgcttctgaaatctcttcctcccttaaggtaaggtgctgtgtggagcttactggaacctaaacgggggcaagatgaccggtcactaaagggggcgaggttaccagtcactaaagggaaagggggcgtgatgaccagtcactagtgggggtgagacaaccggtcactaacgggggcaatatgacccctcactaatggggtgatcggtcactaaacggggtgagatgacaggtcattaatgggggcgtagtgtccggtcactaatagggtgtgatgacctgtcagtcattatctcttgcataagagacttcccaggggcagagcagacccggtggacagcaggagctgcctggtcccactgctgagttttatgtctggatgctgaatagctggaggaagcggcctgctggttttgttcacactgggtgaacagttggaatacaggttcctcgggcctgtcctaaatgctatcagtctttctctagagatggggcagttattatgcagtgtgggatccacagttacagagcggatgggggactaagaacatccattctgcagaaagtgggacattcagggcaatagggaatctgcttttcaatgcagcatcccagtggggtggccccatcacttctgacacctccatcactgatgcccccagctctccccacacctgccattccccacgttaatgcagcagggatccagagaagggtctccggacatcactgatgcccccagctctccccacacctgccattccctgcgttactgcagcagggatccagagaacactgtccggacatgcaggggaccggagtcctcaccactcccccttttgtcttctccaagccagggtcaaagctgcctcatgcagacggagaggagaagctgcgttccctgcctttcccgaattgtttgtggactgtgagtgatgcatgtcctgtggcaccatgggagcaccagggaacaccatgctgtctctccccggagcccccactggcgtcctggccatttccagcttgtctcccaaagacaggcttctttgtgctttggtcacacggagaattatcagtgcagtctctgtctctctctctcatttccccctaaattgccacatgttgcaactcccaggcgtgcccccagctctcctgaggctggtttgcagtggccgggcccagctaaagcaactgaacctccagagcagaggacagtgtcctgcctgcacgtcttgacatggccccacaggagggttccctgtctttcacgtgctgatagaccaaacacaccaaacgcattcccgggcaggtgtgtacatcagaacagtgatgaatcagggacccttcttagtgctactataagtaacaacagtgagtcagacgggtgcaaaccctttggaagactcagtctgcaagccccagggagcacaggggggctggagggaaccgggggagggatgcacaggcgagaaatgcccatgacccggtccacaggtcatgcacgtccacactttctaaaaaaccacctacaagaaaggggttgtttcctggcccccagtggggtgcagaatgtcagtgctgggctgcaccctgggcagggctgctctgggcagcatcgccacacccgtgtcccattcttggggtgcatccccttctcacatctgtgtctaaagccaggaatgggcagtgtgacctgaggaaaatcagggacaccctctgtgtcctcatatgcaaacatgtctctttcatgccagttaaatgaagaaaaaggcaagacctaaatcctgaactcctaccgctataacacattcctctgcgctaaggaactgacattctaaaggtgcagatacccccgggctggaggctgaatgggcaagaagatcccggcacagctcaggctgagtcgaaagaccgtggtttttggccaggcacagtggttcatgcctgtaatcccagcactttgggaggctgaggcaggcagatcacttaagcccaggagtttgagaccagcctgggcaacatggtgaaactctgtctctactaaaaatataaaagttaagctaggcgtggtggcgcatgcctgcagtcccagctactcgagaggctgaggtgggaggatcgcctgagcccaggaggtctaagctgcagtgagccgagattgcactactgcactccagcctgggtgacagagcaagaccacaccttagaaaaaagaaaagaaaagagaaaaagaaaagaaagaaagacagcggttttcataagggggtaagactcagagggcagaagaaagcggagtcttgtggggggcaccatctgtggctgggtcggagggacgagggctgctgtagccctttcctttctgcaccgctctgaccaagtgcgtctaaggggtggagggatgaggggggtgggtgccttcgtggctgcttagccatgattctgctggacaccatggtctgggggaggcagcgggggcgggtgccacctcaccttcgggtacctgacgggccggaatgacacatccttgtcatgtccaccccacttcacagatgggaaaccggggctcaggtaactcaagggaagcagcattgagaggtcagggcaggccttctgcccaatcccccgcctgctggctgtgttccttccacactcggccaaggtctctgcccccgcatcccaccccgccctgcccagggctgcgctgacctgccttctccccctcctcctcattagctgcaaagaaaactcttctgggggctgccaaatgcagagctgcttcgtgtcccttctttgacagtaaaagttgttttcttggaaataaatcaaatttgtatttctcaacaaaacctgccctccatccctctatgaagaaaaatgcaagttgctcttctgcgctccaaatacaccgagacgaaaacaagcccaggtgaagctgcagctggggacacgagttaatgtgagtgcgagcccagggcagagcgggcccagataaataattcatgagcgccaccggggaagaccgggcactcgtggagttcaacagatcataagcaggatccagggtcgtgtagcgacacagcttcccaagcaggcgagtgacctggagcacagaggggagggacggggacaggtgcagcagagattgggcacgggccaggaatgcatcacggcacctgcgcacaggggtggcctccaggggctccaagtcctctgggatccaggttctccttccttcagggcacccccacccaccctctccccaaggcttgggccacactccatgccaccatgcccaacggtccccgccctgcacccacctctggcaagttctgggcagggggagagcgacacaaggcaagggaggagacatcggtggatgggggagcagggcaggctgggggtcagggctcagggcggtgctgacagtaggacatgctggtccccttcccagtgaagtcccaggaaacagcctctcatgttgctgggccggtgctcaggagctggggctgcctggggcacaaagcacgtggactaggacactggaatgtcaccgagcttccctccgatacagtgggagggaggacttggcgcacagtgggtgagtgaatggacaggcaggagtgaccagcccagtcccagcgcttaccgaggaggactggggaggggggccgagtctccagtcaggcagagagagctgctggtgtcaaccctgccagcaagatgtgccccagatccccagagtccagcgaacttccctggccctggccagagtccacgtctgactctgaaggtgtgcggggtgtggacatgagggcactgctcatctccactgccaggctttggggtgtggatgcaggggcactgctatctccactgccagggctgctggatatgctccagcctgtcacaagccaaggcgaccgagcttccctgagaggcacccagcctgatgcagcacagggcaacaggctggggcatgacgggctctgctgtttctcagtctccctgtgatgggagtcgcaatcccatcctcggagggtggctaaggggatccccaagaaagtacccggacaattcctgccacagagacactttaaaaagggcaatggccggcatttctgaggtttccttttcctaaccaggaacagattctctttgacaaatgggtcttgccacttgttatgaacccaatgccgtgggcccggcctgcacttcctggtggagtcctggccccacccagctcctctacacgtcctcttcactgaaggaaactcacagagccctggtggcaccgggtgctgcccgtgcagggcacagaaactcagggccggtttccctctggctgagggagggtgagggagggcgagggagggcggacctgtttcctgttaaaccctggagctagcacagacttgcagcctgcctgggacccagtgaggatctgtggagatgggctacagggagtgttggggtgagagctgcacggggctgttctcagcagatcccagcaagtgacacacccaaggctggggacccaggacaaggccaagggcacctaagcaccaagcaagagtgagattagaccctcccagaagtgatgcacccaaggctggggacccaggacgaggccaagggcacctaagcgctgagcaggagtgagatcagaccctcccggggctcaaaaaaggctcccagcatcggtcacagcccgtgcccctcgcaggcctgcatgacagtcagggcctccatcaccatcaggccagcacaggcacagcccagacatgcaggaggctccagccagtatttgagaacagacgcctgagtgccgggactcggcccacagcccattcgcccagggagactggtggtccccatgtgccacccgagctgtcaggcactcagtatgtttttaaagcctcactttttaattatatcatctaatacatggaaaattgtgtatcactactgtaaatgaaaagcagaatcattgctgtgagaaggccaccctaaaggtgagttccatgaaaacaaaacacccaaattttgttcatttaaacgtgatcaaagactgcatggcgacacgttctctggaaagaggggctgctcatggccccgagtctctcgctctccaggatgagttgggagtggaatcgccatggccacggagtcccttgcagcctctgagcttctgcctgtgggaagagctggcaggttgggggaccggccacacggtctgtactgagtgggtctctcagcaccacctcattctaacaggagggctcctgaaatcagcgccttatggtgctaaggttttaataacacattagaatacacagaactaaataaaaataaaacaaaacaaaataaaacacaaaagctgtagaggattttctgctctggaaaacaccagtgcacacaagcctttatctgggggtcccctggaggggttggggtggcccaacagagagcagggagcagaggcagatgtggggggtcacactccaccaggagcccccaggcaccgtggccacaggacagccgagcttgtggactgtcctccagagtccagctggaatcactgcccacgcctaaatctaagaagaagtatgcgatgggaagaccttttggctccttctgctcaggaagcatagacagtatcttcagttttgcccacgcaggccccttgaaggggacacacagacgccaggagacagacgcgtggcggccgggtcactcccagtggggagctgtggtttgggcgcctgagcctggagcccccgtcttactgggaggtgttcccttatgacggagcccacggggtctgcccaggtcacagtcccctcccacaggccacgcttcaggaggatcatcgcaggtgggtggcctctattgaggtgtgagctgcaactttccattttctgatcacgagctctaactcattttcccacaacatattatgggcggctcataagattttctatcaaaacgtaaatagattcggatttctctgaagagcaggtttcctatatcggtgcgtacctgtccgtgttcacattaagaccaaggacaaaagaggaaaatagattttttcctaggttgtatgactttatgaaattaaaaaaaaaaaccacctaagcagccctgagcctccgcaaaaaaagaccccacggggacatcccgtacctggtcagagccaggacataccccatgtgcttttttttcctcccctttcagaaatgtaatttccatgacgcgtccacccagggccaggaaccacagaagagaaagagcagtgggaagcttccagaaactcccatgagggctcaggaaacatggggaggtggcgatcggaatcatctgccaggcctggagagccagaggtcggccagccgggaggtgtcctgtccctgagtccccgccctggctccactttcatgcaagagaggggcagggtgggccacagagctaggtcctggagagccacccccaacccagcacgggtccaggacagcaggaagaacccatcctaggtcggaagttcaaatctctgatttgagatgagtgttgaccctacgggggttgaaggcctctctggagagcgtcgattgagcagacaggcccagagctggacgatctctccctaaaatgccaatggcctcggaagacaaaacccaaggggggtcagtggccccccatgcactgagctcactgggtctccctgcgcccgtgtctggagtcatacacaatgctgttattttactgcctaatttcaaaatgcacggctgcagtttacaccctgagctgtggcttgaataatttatcgcaaagtccctgtgtcagtgaccagtgtgttgggtgttgctttgaaacccacagagaagacctaatgtatcacgttgttttcctcctctttaaatattattgacacagcgatacttcactacaggccattaatactggtctgcttctagaggagaaaataccgatgcaggtcagggcaggtgactcgctctgagccacttaacactgggtggcaatggtaacccgccactgcttcctttttaatttaatccacgaagcagcacagcaaagtttcctcatatttctcctcttaaagctgacagaaaataaccagcagaaaacaaacaacacatcttagggaagggaatttagacaaggacagagaccagggagcgagaggaagatgcctgtgtttcccacagtcattgggatgaatctgaggcagcgttagagcgagcgccttccactttggcccacagctccttgttcctaaaatcagcaccgcatccccagcttacagctccttgttcctaaaatcagcaccgcgtccccagcttacaactccttgttcctaaatcaatgccgcgtccccagcttacaactcctggttcctaaaatcaacgccgtgtccccagcttacagctccttgttcctaaaatcaacgccgcgtccccagcttacagctccttgttcctaaaatcaacgccgtgtccccagcttacaactccttgttcctaaatcaacgctgcgtccccagcttacaactccttgttcctaaatcaacgccgtgtccccagcttacagctccttgttcctaaaatcaacgccgcgtccccagcttacagctccttgttcctaaaatcaacgccgtgtccccagcttacaactccttgttcctaaatcaacgctgcgtccccagcttacaactccttgttcctaaatcaacgccgtgtccccagcttacaactcctggttcctaaaatcaacgccgtgtccccagcttacagctccttgttcctaaaattcaacgccgtgtccccagcttacagctcctttgttcctaaaatcaatgccacgtccccagcttacaactccttgttcctaaatcaacgctgcgtccccagcttacaactccttgttcctaaatcaacgccacgtccccagcttacaactccttgttctaaaatcaacgctgtgtccacagcttacaactccttgttcctaaatcaacgctgcatccccagcttacaactccttgttcctaaaatcaacgccgcatccccagcttatagctccttgttcctaaatcaatgccacgtccccagcttacagctccttgttcctaaatcaacactgtgtccccagcttacaaacgctgtgtcacactctacggtttctatctggttttattttcatccaactctctccaggcctgcctgtcactcagggagagatctcaccagtccagccacatctgggagataaaaatgcccaattcaatgagcatttgttaaacacaccccaaggtttgttgccatgaattgtaaattcctggaaggcagcaaacctgcagtcttagagtaggatggggcctttcagcccctgaacgtgcatctgggtgtggaccaagggcttgccagccccgcaaagggcatgggcagcctgctttgcctcagcgtccacatgagcaggcggcgtagcacctcctgtcagaggggaggatccacgtgtgcatgtggaggtgcagaaggaggggtcatccatggaaatctgacttctacggcaaactcaagtttaagcaaaagtagactacccttcggaaatgcacactggaacgatagcaaaacatgaaatcgacgtaagtgtccatcagtggatgaatggataaagaaaacgtggtgtgtccacacaatggaatactactcagctatgaaaaaggatgaagttctgtctgttgcgcacaatggaatactattcagccataaaaaaggatgaagtcctgtctgttgcacacaatggaatactattcagccataaaaaaggatgaagtcctgtcttttgcacacaatggaatactattcagccataaaaaaggatgaaatcctgtcttttgcagcaacatggatggaactggagccattatcttgagtgaaacaatgcagaatcagaaagtcaaatactgcacattcacacatttaagtgggagccaaattacatgcgtgcatggatgtagcacatgggacaatggacgctgcagacccgggacgctgggaagggagaggagggtgagaattcgccgctcgggcccatctatgttattcagtgatggctacactcaaagcccagacttcaccactacacaacagatccacgtagtaagaccgcacttggaccccaaacattcatacagtaacaaatattactaagagaacctactggtcagatagatctttgctttcctgccagtcagtgccaggggagctttggtctctcacacggcttagagcccttccttccaaggcgggcagctcctgcgtgcacatgggggctcccaccaccccgagggccggtcccccatgcctgttggagggtggtgtgggtttgctctggctggtgtggacaagcccttaactgagaacagggtcaggggaccttctagctttcttctctagctttcttcgtctctagcttttctttttttaaggcatttattgctcctgaaaataatctgtgcttgcaaagaaaaaaagtcattttgtttcaaatccagtgataaagaatggatcttttcttctcctagcaaaccattttcccttgccccaggggaccatgtatgacctgagccatcttcccccacgccaggccctcaggagacccaacctccctgacacatcctaggcccggggcgggtgtggggaggcacgagcttctctggaaaccagcagctgtcgcctgcttgcccatctgtcaccaagctctaagtcctgctgtctgctcaacaggcatgaggagcagtcccacagtgcaatgaggccggcacgggggcccagggagggctcggccccaggtcccctgacgtggggtgtctgccctccccaggaggacggggttgggggcacatctgatggggcctgggtcatgcctgccagttctgcacagagctgcctcctgagtgcccacgtgccctgcggggctgcctggcggctccatttgctctgtgtctgtggagcaactgcgcccctgggcccgcctggcctgggctcccactgaggtcacagcacctgggtcattcagctccaaggatggggcaggccccacagggcaggaccccctccagcagttcctgcctgtcctgggaaggccacggagacagacccttgacttcaggacagggggctgctctttccataaatccccctggctggcgcctggagcccaggttcctcccacacagccagtcattcctgccatccacactggccctgcaagggctggaagggccacaggtgggcctcactcaagagggaaggaccagggaggagaagggagccacattagcctggctgggtgggcaaagccacgtcagcagccagaatgtccctgcagataaacgtggggggaggcatgacagaaagccgggtttctacagaaagaggaggccagggaggggcagagcctggggggaggagtgcagggaggggcaggcagagaccagtgggtcatagggaccctgtggagcccccagaccagcccctgcacagaggagaggaatgtggggccggaggaatggagtgcaggggagatgagtgcacgggagaggagtgcaggggagtggagtgcagggctgggggagagtagtgcaggggagagtagtgcagggcagggggagaggagtgtggggctgggggagaggagtgcaggggagaggagtgcagggaggtggggagaggagtgtggggctgggggagaggagtgcaggggagaggagtgcagaggagaggagtgcagggtggggggagaggagtgcagggtggggggagaggagtgcagggtggggggagaggagtgcaggggagaggagtacagggcgagggggagaggagtgtggggctgggggagaggaatgcagggcccgggaaaaggactgcagggccaagggagaggcccagggcccgggctgcagcctggcttcagcttttacccggcagcctcagagctctacttttaattaagtgccttaccaaataattaatttgtactcctctgtggaataggaaaagagccatgaaataattaaagaattaaaacactagctcagagccaggagcagcagtcagggctggcccggaggctcctgggctctgaccacgccatccatccgctgaggacagcagaccacctgcgtgagacgcggaggagcagcagctctgccgtgagaggagcccgtgtccagcctccaacgtagatgctgtgttggacagagtctaaatgtagaccgaataagctacctcacatttcaagctcagtaaatgtaatgtttaatcacacctgtaatcccagcactttaggaggccgaggcaagtggatcacctgaagtcaggagatcgagaccatcctggccaacatggtgaaaccccatctctactaaaaatacaaaaattagctgggtgtgttggcaggcacctgcaatcccagctactcgggatgctgtggcaggcaaatacttgaatctgggaggtggagcttgcagtgagcagagattgcaccactgcactctagcctgggtgacagatactccatctcaaaaaaaaaaaaaaaaaaaactctacttcaagttgtaattctgagattttgaagcacgtttggctggactccatccttcatgccccacgtaagagggttgtgttctgggtagagaagtcatctttgtgcggggtgcgaggcatccgggggccaggggactgtgagctgcagcaacagtgacccctacagtgctgacagtgtggggcggtcccgggtccgatcctggctgttcctccgagcggccgtaggggtccgccctggcccctacactatgcccaccaagaggacctcctgtaaacgtgagcctcatgccagagaacccacagccagcccctcacacccctgcactgaccggcttttatttccagcctaaaagaagagaaggcagatttagttgcctgaacacaaaccctccttctccctcgctcaagccatcagggggttctagtcggcttgtccactctcatctcctttaaataaacagcaaaaccgttttcacaactcagctcccaatgtgaaattagtttcatggtgactgagcaccgtgtgctgcccgaatttctcaccaacctcagacgctctcgttttcacgtgccacggagctacacaaagataaagcagcccaataaagacccggctgaaggcttttgtgttctctcactcttgcccacttaccctgcgttttccaccaacacaggcaggggaaagcttggcctgggaacctgagttctgggacctgctccctggctggacttgctggcacccaccggagatgaggcctccaggaaacctgtcatcgggagactcgtccacacgacgagaccagggggaagaggtgctgtctgcagctgttctccgcgagtccctggcccacctgataacgagttccgtaactggaaacatcaaggtgggggtgtgggtctgagacttcactgcactttattaaatctcagccactcaaaggtggggtgcagactggggttcgcagctccgacataccacacttgatctcagatgtttacctgatgaactttggcctctggtttttatttttactttttttttttatttttcattattattttttgagtcagagtctcactgtgtcacccaggctggagtgcaatggcaggatctcagctcactgcaacctccacctcccaggttcaagtgattctgatgcctcagcctcgcgagaagctgggattacaggtgagtgccaccatgcccggctaatttctgtatttttagtagggatggggcttcaccatgttggccaggctggtcttgaactcctgacctcaaatgatccacccgccttggcctcccgaagtgctgggattacaggcatgagtcaccttgcccaacctagtttttatttttttaattaactgcttgcctcactaataaaacttctcttttgccaaaggatgcttctcaggttgcattccccagtcaggggaataaccagaggattaaaacaaaaggttaaagtgatcacttcaaaaacaattgccaaggcccgtaagagaagggtttaaaagccccagggccatgcttggtttcaggccagagggttctcagctggaatcacccaacacgtgaaagccgtggagaggccgggatgaaagcacctggtcaccactaacgccctgcacacctttccttcttcctcctcctctttatttcttaacaggaagctgcctgacatttcggctttgaggtctactgggaagcatgactgaagttggggtgcagggtgggggctggtgtccggccgcaggtggggagcagggtggggctggggtcgggccgcaggtggggagcagggtgggggctggtgtccggccgcaggtggggtgcagggtgggggctggggtttggccgcaggtggggtgcagggtgggggctggggtttggccgcaggtggggagcagggtggggctggtgtctggccgcaggtggggtgcagggtgggggctggggtttggccgcaggtggggtgcagggtgggggctggggtttggccgcaggtggggagcagggtggggctggtgtctggccgcaagtggggtgcagggtgggggctggggtttggccgcaggtggggtgcagggtgggggctggggtttggccgcaggtggggagcagggtggggctggtgtctggccacaggtggggtgcagggtggggggtggggtttggccgcaggtggggtgcatggtgggggctggggtttgaccgcaggtggggagcagggtggggctggtgtctggccgcaggtggggtgcagggtgggggctggggtttggccgcaggtggggtgcaaggtggggctggggtttggccgcaggtctggtgcaacgtggggctggggtcgggccgcaggcggggtgaagggtgggggctgggatctggccgtaggtggggtacagggtggggctgaggttcggccacaggtagagagcagagggccttctcccacaggcctgctcttggctgtgcatgtcacagaggggaccacactccacactcacagcaacccagaggtagagttcacgtgcaaagaatgggaagctggagccttaaataatttgcctaagttcaggcagcagcaaaagccagagccagaatctggaagcaggtacagctgattccaaacctacctcctatacccatgacccctcaggaccacagggcctgagtccacggctggggacgtgcacagcagggggacctgaggaccgggagggcggcacttcagcctcacgggcgctcccaccatgcagacagacgcaggcagtgtagtagatggtaaaacggccgaaaaccatcagcagcctcaggaccgccctgtcatgatgccaactcccaatccgtgctgagagcccggcactgcctcagggagattagcaaacacttttcatctgtttatacacaaacagcaggcatgggcccgctggccttccaggaacatgagtctgcgtgactggctgttgtgccctcacccggaaccgtgccaggcaccgaggaggtgctcagtaaactatggggttgcatcgtatttgaggtcatccggaggcacccgctgctgcactgggactcctggagatcctcctccagccggaagctggccaagctgtctccaggtcctgggatcacgttgtttcagtggagacgatggccgccagcttcagattcagaaatggcacttagtgcctcttcccttggagtcacctcgggtgacatggggtggcccccatggccagcactgaccagctctgccccccaccgaggcgggagccacatctcaccaccaaatgcccttttatgggaactgaggtgcaaagcgggggcttgaggcaagcagcccccgcgggaaacacggcgtggtcatcaggcgagtgctgccttagagacccgccccctgcagaggctgtgctctggatggtcactcactcacccctttattaagagttggttctacggaggatgagagaggcagggacgtgttttgggagaaggtcatatgaaaaattagtgccacagagtttcggcccctaaaaagcttccagtttcacggtgaggggaaatgttgtaaactaaaacctctggtggggagagtcacttttgttgcccgaatccccagtacagtggacggcgcctcgtgagccggatggcaacctggccagcatgcagtgaaggaacaacggggccaaatgccgcaggtgtggatgagggagaaaacaaaagctcccactgcgcccctccctccctggagcttagggttcatctgaggggtgaagaggaggatgtgaaggacaccacgggggtcagggagcctgggaaatgtccaggaatcctggggccggggcctgctccctggaagcagatctgaggacgtttcgggcaggtcagctgcagcgagagaaatggacttgccggggaggaactcccggctgcctcaaagctcagcaggtccacggagcaggagccacacaaggctcttcaacaagccccgtgaggtggggagctggcctggaccaccctggcgtggacacggctgggctggatctcatctgtggaactcctggcaggagatggagtgccctggtcctggccggggtttggcagcacaagtgggggtctgctacaggccgcttggatccaggggaggaggaaagagcacaggagagggcaggagatgtttggcttctgtcatgagctgacctgtgtcccccaaaatccacaggggaagccctgaaccctcatgtgactgtacttggggacagggcctctaaagaggtaaaggtaaggccgggcgcggtggctcacgcctgtaatcccagcactttgggaggccgagacgggcggatcacgaggtcaggagatcgagaccatcttggctaacacggtgaaaccccgtttctactaaaaatacaaaaaattagccgggcgtgttggcgggcgcctgtagtcccagctacttgggaggctgaggcaggagaatggcatgaacctgggaggcggagcttgcagtgagccgagatcgcgccactgcactccaacctgggagacacagcgagactccgtctcaaaaaaaaaaaaaaaaaaaaatgaggtcctgagggggccccaatccaataggacctgtgttcttcaggaagaggaagagacacacagcctgcatctacacagaaggacagcccctgaggacgtggccacgacgcagccaccgtgagccagggaatgcggccccaggaacaagccctgcccacaggcgtcccagacccaggccttggggactgcagaggatggatgtctgccccacctgtggggcttcaccgtggccacccgagctgactgacaggggtggggaagcacgccatccgggctccagccctgcggttggcgggatccaggtttcttggtggtggcgagcttctcacatgggcttggcggcacctcccaacacgccaaggccagtggtaaaacgggcctctgctttttttaaagaatagcttgtctaatgactctgagagcatctattaatttcatcactgttgccgacttaatcagcaaacttcatttacaattccacaagctacgaaaaatcatttgctactgtcatagcagtataggaaacgtgtcagcaccttgggagcctggccagtgtttcatttcactgagttccagaagactccggctctcggatgggagcagcccccatggctgcttttcggctcctcgtttggaaaacttggtgactctctaaggtgataggaaaagcaaaaattgctctgttaatgcttccagtgcccaatttgggagtaaagaatgggttttatcaccaaaaagaagacttcacatgatgtttctgcctgagagaagtaggcagggtctaggggccatcctagcctcctcccatcccagaggatgagagagggaaccgcccacttcctgtgtggccccaggactcagagctaccctcaatggcacccgaattttattcctaacccctcccagatgcttcctgtgtgtccacagctgggtggtggttctagttttaggttttttatatttaaaaaaccagcagattaaaaaattaaccagcatctatttttaaagaactgcatgcattcctttgctataaataacaccttagtggactctaaaaaaagtaattcaaaacaatcctttttcactgggtttgctgcttgtttacattatatttctctgagataacagaaagaggcacatcttatcactttcctgacagtttcattttcaggatctgataatgctatgtgtgcttatatggaaaatattgatcccactatactctgctcttcctaaatttttcattttttaaaaaattcatgacagtatttgattcccagaggttttacaaaccatctccttcaagcaaatgcatgtaaatttcacttctgtgactctgagttcatttttaaagaatggttttagaaaatcttcttctactttgccaaatttcatctttaaaatgcttgtttctgttcctctcatgataatggtaatgtttatgatggctgattttaaaacctcttagggtatgaagtgtgttgtagaaatgctaaatgctaatagatacataaacagtaagatggaagcgggagaaacacacacctccccctttcctcacaagcctcagcatttccggcttgagaaaatcggcctggcacccatgaagtacctgcggtctgagctgtgtggccactatttttttttttttttcgagacggagtcttgctcttgttgcccaggctggagtgcaatggtgtgatctcggctcaccacaacctccacctcctggattcaagcaattctcctgcctcagtctgccgagtagctgggattacaggcgtgagccaccacacttggcgaattttgtatttttagtagagatggggtttctccatgttggtcaggctggtctcgaactcccgacctcatgtgatccgctcaactcagcctcccaaagtgctgggattacaggcgtgagccaccgcacccagtcgtggtcactcttaaggtgggtgcagcttatggtggcgaatatggaaaggttactattggctttcgctgatttctttaaaaaaaaatgcaaagagaaaggtcactaagcaaaagacctaagctggtttggaattcactaatctaacactggctagagtttaaaaagtaggggctagtaaagcccacttgatatgcacaaaataagattagctgcagcgttttgctgtccacgttgtcttagagagctggaagatggggtgcagggggaggtgcagggcaggaagcatctgcggtgaggcctctggtcagtcactgcacagctggagaaggctcaggtggtgctcgtggcccacgaggggttctccccagaagagacaggaagggcccaccgtggtttcccacagcaatgtcctcatgcacgctgaggcacacatcttacgtggatgctgttagtattcagtacactgcgtctaaaatgcacgtgtgtgcaaatgcgtgtctctagtgcactcagagtgggaagtctgcacggctccttttaactctatgggatcatgaaggaaagtaaaaccttagaggctgaggggtttctgcctgcatctgaatttctttggaatgctcatgtcaaatctgatggaaaggtggtactagcagcagccactgcccaaataaacatgttcaaagctccttttcaccaaggcttctgctgtgaacctctcccttcttggggcacctgctgccccttcctcctgcctctcctggggcagcacaggcacctgcaaccaacttacggagttttgcagatgtgacaccctaagaaagcagccaacactgtgttcctcgtggaattactgagttcacatcccttttcctttttagagagacagatcctataggcagcatgaatggaaatgcaaagactccatcgatttttaccaacttttccaaggaaagtccaaatcatgtttgctcctccatggtggtacagttcagtgccagcctggtctggccctggagccttcttttggcatccagaacatctccctgacaacccagaaacacagctgacctcctgccatcctgagcctcacaagcttgctggacacctgcggtgagtcccagcaagggtgagtcccagcgccaggcaaagatctggcgagggaagagccgcccgggatgcagacacacttatcactcacttgccatttccacaacctcatttctttgcagctgtggacggcaatggcttccttaagggccatcccacccctatggagatagatgccagggcttgggagccacctggtgtggctgtgcacgctgagtgtccttgtcactcagaggaaggtaggcccagggtcccttaggccaagagacttgtttgggtctgactggggccaccctggctgtacccacatttccaaaagtaaacctgtaacgcatcatgtctcaaagacaggaaaccccatggacaccccagctccatcatgcggtcatgacattttggaccaggagggcctcctgtgtggtcctctggcgggaagcctgctagtctccctagggctgccctaacaagcctcacagcctgagcggctcaaacaacagaaatgtactccgtcacagttctgggggctgaagtctgaggtccgggcttcggtttctcctgagactgcgcaggctggcgggcggccgtctcctcctgtgtcctcacgtggcttcttctccagtgtctcttctttcaaggacaccagtcctgctggagccaggcccaccccacgacctcacataacctcaatcgcctcctgaaagacactttctccaaatacagtcgccttatgcggccccgggtgttggcgcttcccaggtgaacttggggaacacacgtcagcccatcccaggtggagctgcggcagtgcggggtgtggctggtgctgggggtgggcaggaagggtaagcaggggacgagggatcagaggcaggaggtgtcctggccctaacatttcctttgcttctcgtaaacctcacctgagcccacccaacaccaaggccacatcaaggagagaggacaaggggagagtgatcacagggtgtgacagtgatggaggggacccagacgcagggactacggagggcagtggggcctcacagggcacctcccacagggagcagagagcggacgatggccggtggtgatgagatgtggccctgctgtggaggaagcgccaggtgcatctgatgaaggcatgaagacacagaaggggacaggaaggggctagaaagaaaagtatcacagtcagcctggtccctatgctgtgtgcacgtgcatgtgtgtgtatgtatctgggtgtgtgcattgcatgtgtgtgagggtgtgtgtggctgtgctatgtgtgagggtgtgctgtgtgtggctgtgtgtgggtgggtgtgctgtatgtgtgtgggtatatacatgtgggggtgtgtgggtgtgtgtgtgctgcatgtgtgtggatgcatgcatgtgcacgtgtgtgtatgtatctggttgtgtgcattgcacgtgtgtgagggtgtgtgtggctgtgctgtgtgtgggggtgtgggtgtgtaggtgggtgtgctttgtgtatatgtggggtatgtacttgtgcacgtgtgagtgtgtgtgctgtgtgtgggggtgtgggtgtgtgtggaggtgtgctgtgtgtgggtgtgctgtgtgtgggtgtgggtgtgctgtgtgtgggggtgtgctgtgtgtgtgggtgtgtacatgtacacatgtgtgagtgtgtgtgggtgtgctgtgtgtggggtgtgcattgcacgtgtatgtgtgtgggcatgtgcatacacactgcctgatgggttctgaggaatgaacggatccatgaatcaatgattacacccaccaaaatttctactgattgcatgatgggaaaatatggaataattgcccattcttattttcattttcaggagaaagaaaacaggagtgagacaccaaaacgcagggctttgtttacagagaaggccgcgggggctccccgccaggtctgtgcatttcaactcagttctgtccttcctcataaacagatgaacctgtcccgcgcgcgtggtggcggcttacacggcggaaacaccctcaggtgctttctcactatcaaagagcagcttagcatttatttcatatttttgtcttccactgattcttatttattttacaaattgcacctgaacaataaaggaagtcattccaaaagcagcagcctgccccccaccagcaggcagcagtgacgtgtctccatggggccttaaaccttcagggccacgttgtgatttatcttcacacagcgcttggcgcatgcgggcctctaacgaatgtttagaatttcagtgactctagtatcaccgttttctttctatcttctcttccacgcacgtgtctgtctttctcatggtctagtcattgtaagtttgttttttaaaaagttttactaagtacatatgctactaaatgtggtgagtaaatgtttactgttcaattttatcacgttgatatactcagacttcttctgaaatgagacacaggctttctcctttcacctttgtttccaagatgctcttcctgcctctagctccccgcactccctgcacttccccgaggtcactgcactcacagagcttcctatgtgatcagttccaccaggcatagcaggaattcttctcatttgtccaaacgaacagagccccaggaggccccacctggtgcccgtgaccgaccccctcagtgaacctgcaaaggttcccatgcacaaggcgacgcttcagacatttcaccatctcactctccaggtcggacttgaaaacgctctgatcaatgatcaaatctgcttccacccaattcaaatgcaagcagttctgaggcacgattatacacaatacgtgctatttattaaccgtcaccactcagctaggttctttgccaagaatttcccaaaagaagtcttcattctacatagcaacttgttcttatccatgggaaagatagtgtcttattttaaatgcaaatgaagccgattcagcatgtacaagcagaacccgcaaatgagagaaatgttggtatatgtgatttgtaaataacagcatattaaaaatataatagataaaatgtttccaatgataaggccaggattcttaataattggataatcttaatcaaaaatcttagatgagtaaaattttcccacttaatataaaaaccacgacatcaagctgagtataaggacacatttaaattctggccaaaaagcaaagcttatcctgggagttccaaacctccttcctgcctgggcacagctctttctgggtatatagcacatgataaagagatcaatctttgagctttgttggaaacagcacacgaggtaacaccaaccaagcatttaaatttctgatttggatctatgagcattgctaatgacacactcactgcacacttgaaactcttggatttccacactcatcatcactgatctacgccacgccattcccagaattccccatgccatcctgccccaccatgggcaccagccaaacccactgagtaggcactgtctcccgcccatccttcaagaccaggctggcctttgcctgccccagaccctccaccctcacttccagccatgcccctgcaggaccccgtagagcacttcatcttgtccctgtccttgtggaggaggcaggggcctgtgtgaactgccctgcttactccggcatccccagcagccctcagcaagctcagcacaaggtaaagcctcaacacgggaggacggagttcattttcctccactaccacgagatcctggggggccaggatcctccaggtccgtcctttccttcctctgctcacccatccaccagctcagcacctacttcaggcctcagacgttgtaggtgctacagagacatctagagagtgaacccacagacacacaaataacctgtgtttaaaagtgtgttaacagcattgggtggttcccagtggggtacacactacatcatttctacacttgaaaaagtaagaattccaagatggatggatttactcaaaacctcagaaacaccactgaccagctacttctacaaacatcagttctgttttgtcctgcccactgtgcatttaggctaacaggcaatgaagaaatcttgaaactatgagaaactatggaaaaaaattcaagttttaaggaagatacagtagcaccccatttatatagcaccagtaaaagttattccaaataaatatattttcagggtaacttaaacttacccacataacaccagtatgagaagtttatatactttaaaaagtctattttttaaaaaagtattgtttatttctctgctgccttacacacagtaaacaaaagttaatttattcctgatgactaagactcctcctttaaatttcagtgaggccttgggccccccatggagcacctcagatgctgcaaagaccagtgggtctgctccccccactccagatggtcccaggtgggcaggggaggaagagccccattttaacaagatctttccacttagaataacaatcgcctccacggagaaggttttagaagttaccagtttgtaaacacagacggaatcctgaaataggactgtcaccttgcaccttgcacagagatcccagcaaacaccacaaaggtgtacaaatgacaggaaggtgtgcagatgacagagtggtctctgctaggatctctgcggtgattttacccacacaaaaccccacctgggtctgtacgtcattgctaaagacatcagatgtgcctgtttgatgctgtgaaagtttttcacatcagcccgtcttctcacaacatagaaagaaggggaaatttacaaaagagcatgccagagtctatgtctcccggtgattgttaaaagttggtagaggcctcttctctatcatctttgtttcaaaatcccttatgattttaacaaataccaatggcctgaatcaaagatgcacaaaagatgcacaggtgtttgatttcattccagtttgaagcatccattcaaccagaagagggagcacatgtttaaaagaaacccccaaaccgtcagaccatcgtcaccgacgatcaccatattaagtggtagaaaatggtacaaattaagaacatatcatgatgcttaggttcttaaggagctataagcaaaggaagatataaaattatataacactgaaagtgaaaatgaaagtaggaaactacactttatattttgtcccctctgtggtttttgggaacttatcctacaaactaataatcggggacaaggggtttgaaaaaactgtcatctaattttctgtctcacagaggagttccctcggacccacagagaaagtgagagcagatatatgcgagatgagttttgtttttaaaaagagaaaaagaacaatcttactcagaaaaaatccagctggattagttggtcatagattgttattttacactgaggtgctttttccccacagttctttcttggtcaaatcatggtttctttctttttttggttgaaaaactacaacaataagagatcaaatattccataactcaccaaagacttcagaatcaacttgggtgagaagagcatccttttctgaatgtggatgaagctgccccgatcccgagtttgtaggagagccattcgtcctgaaattgttggataactgctccctcccactccttggctgagagagtcccacgtgttgggggcaagaaccacacatctttgtgcactgttcttagtgtctgacacgtgcctttcggaagcagatgtttaaaacaatctgctcagtgagtgcgtgaataggtaaaaggttagggaatgaagggggaactgccgggggctgatacatagatgacacgacgctggctttacacaccacatcacggtgagactgactccagcaagcttacatcactcagacggcaaatatttcaaagaaaaaatccatagtgtttagtaagccacagaagaacattttaaagtaaggagtaacaaatctgtatggaagaatttccaaaattcacaaagcgtagaaagaagattgttaaaaagtatgtccagtgattgacttggagtgggtacggaggcatgggcagtggccctggactgctgcctctgctggcaccagctcttattaccaccgcttgaagaacatggtacatttgtttctcatataaaaatgtgaaagcaggcaggtcggggctaatatggggactcatccatgaagccctcctttctcccctcttgaaattcccaggtcacctcttggaccatggtgtagcatcagctccggccatcacatctgcattccaagagcagggatgagaaagagaaatgaaggagcaaaggcacatacctaaccttctagctgagatccactggccacacctagatgaaagggagctggcaaatgcagattttactccaagtaggggtgactgtgacccaaatcaaaccctcagttctatctctccagaagaagaggaaagtagaccttaggctcagccacatctccatggagagtggaggtggtcagacagaagtagagatttagaaaagttcatgtgcccatccttccacccacaggcgggatgccaagcacttccatgtttgtcctctcatatatgactcgtaaggccagtgaacacctgtaagaatctgaaggaaaatcaaccataaaggagaaaagttaatgttaccccctcaagcttaggagggcttccataagctgaagagcaggctccttgagggagatactgggttccttgaattccacttcagaatcatggccctgtgccttcttttcctgcttagccaggcagctccctgcacagacttggcaagtttccaagagagtgttcattaatcagagctattgcaattgctgaatattctccagcaaaccattcatctatatatccatccatcatccacctacacatccttccattcatccatccatttctccatccatccctccagcctgccttccttccttccttccatccacccatccacccacacatctacccatccatatatctatccatcctccaattcatctgttcatccatccatccctctatctattgacctaccatctatccaaacatacattaatctaccaattcacttgttcatctatccattcattcacccatctatccatccatcatacatctatcaatccatctatcatccatcattcatcatctgtctatttacccatccatctctccatccattcacccacccacccatccatccatccagccagccacccactcatccacccacccgcccatccatccatccactcatccacctatccatccattcacccacccaccccatccatccacccacccactcacccacctacccatccatccatccacccacccacccacccactcacccacccatccttgcatccacccaccagtttacctgttcatccatccatctatccctctatccatccatccaatcacccacccattcatccatccaccaactcacctattcatccatccatctaccccatccatcatttgtctatgcatccatccagccagccacccatccatccacccacccacccactcacccacccatccttgcatccacccaccagtttacctgttcatccatccatctatccctctatccatccatccaatcacccacccattcatccatccaccaactcacctattcatccatccatctaccccatccgtcatttgtctatgcatccatccagccagccacccatctattcacccattcacctgtccatccatccatccctccatccacccatctattcactcatctatgcattcatcaaccagcatccatccacccatccatccctcatccatcattcagcatccatctacccacacacccatacatccatcactttacctgtttgttcgtccatccatccacccattcatcaaacaatccacctgctcatctattcatccatccctccatccatctacccatccatcaaacaattcacttgttcatccagtcatccatccctccatccacgcatctttccaactacccatctatccatccacctacccatccattcaggaagccagccatcttttcacccattcacccgttcattcctccttccacccatccctcatccatccacccacctatccatatccatcatccatcattcatcatccatccatctatttacccatccatttctccctctgtccctccattcatccatccatccacccatccggccagccagccagccatctcttcacccattcatctactcacccaaccaaccatccctccacacattcatccatccacccgtccatatacccacacatccatccaccacacatccatccatctacccacccattcacctgttcattcatccatccatcccctacctatctccatctgtctttcctcttgtttcaaaaaagatttgattgtttttatcaagtatttttagtgcaaaagcttactttcatttcctaatttttaagagaataagaacttctcctgaatatcatcttttccctttttgctctctcatttgtctctctttttcttcccttgtatcttgcaaatccctcagataaaagtgggttgctgaaatgagaggctcagatagagcagagggaaacaattcagctccagatacccagggggtctaggcggtcagctgacctttcttcatgagcactgcagagtgccagtctgtgcctcatttctactccacgttgaatctttgaatctagtgatttggttgttgatctttgaacttctctaagccattatacctttagttccctcttccccacttgttctctgattgttcattttgtttttaacctaaaatgaacaaatcccctgtctaccgattaaaaactctgaggtctttttagttaatgtgtgacaaatagagaagagatggggagagagagggaaaaagtgagaggaggggtggtgagagagagagagagaggaagagagggagagagggagagagggagatagagggaggggtgggaggaagacagaaaggtcctcaccgcccccgcccctcacccctgtatgtgcatctggaatccactttcaggggaaagcagagccctttctctttactcaccagcagttcatattgttaatttttaactaaagacaactgatttttgccagtagcagagaacgtacgaggtctttcttcctattttctgcaattaagcaaccagctattattaggagttcaaaacaaatcacaaacatgtctgtctattacaattgtctaatggtcccaggtccaacactaagggaaacacatccattcactacagcctagtaattaagacaaaaatagacacggaagccgcgatcgaggaggagggggaacaaaagggtcagcttccgctaagaaagcctcagccacgtccctggggaagtttcatgtctttcctcacacgtggcagggacggctgtggggtcccagtgtgtcacctgcgtggccttttcaggttctgggggcctcggtggaaaacacgcacagtgcatggcctgacacccgctgtttttcctcgttcagggaataagagccactcccaagaactctcattcagactcgtaatcagcaaatcaacacggatgcctctcagagaaaaaacgatgcttccgatttcaggagccccctgatgattccgagtctctcatacaagggaggtggggaggatgggcagggctcgggaggtccggatgactttccccacggacacgggcagagtgtcacacttcacaagccacagatgccttgcgtggcctgtgtgtgtttagaccccgtcctgtgccccgccgggcccacagcacagacgcgcctggctgaagggcgagggggagtgggctgtgagtgtaagaaagtcaccagagaagggccgagtcgagaaggggccactcaggggcctccctgtccgaggcgcggagcccagcatggctgacttcctctctgaaggtcattagagatggatcccaataaatacacacacacccatcagattagcagacccaacggtctccatggcaacaattggacaagcaagtcgcctgcaattggcattaatttaaaatatttttccccgagtctccttggagtcagttccgtgaaacacaagtgcttgccagctctctaatctgcggcgtcctttgaaattccatccagcgtgtgctgaagctgagccaattaacgtggagagaattgggtggatcgcagagaagctggcaagaccgtgtttaccaattaggttttttttatgatgcaaatgttgcacaccatgcggcaggaataaaagctggctacgctgaatatgaaactgttaattgcattttcagagacatagctacaaggtgaaactaatcatacacatgataaccgggcttcaccacctacagtgccctgctgctgcactctcactaatctgtattaaaacagccccacacatccttgcaggaaaggaaaacattgcgtttggtataaccttccaattttaaagagaaaaaaagtgtgcctatgtgggaagcaatataaaggataattttcatttaaatcagattaataacgttaacaaacgccatggcaaagggcccagtggtgcttcttgaaatgcattttttgctttaaaacgatagcaaggtgcatttgcaaatgaacgccagcacatgctgacaagagtggctcaaaatgaaggagcttgtttcagaagaaagggccatggtaattatagaccttggctttcccagctaggaacatcaaagaggccccgctggaatcactagagagaggcttcccagggagtccagtgctcctgaggttcccagtgcccagcccctccctggggaggggaggatgaggcccaggagcagggagaagggtctaggctccaggctccatcccagtgcttgggggcagagaggggtgcccaggagcacctgtgtgcagggagtccaggcctgaactagcagaggcatttctgaaatggggtgtggctactttaaggggtgaggtcagctttcaaaatgccccatgagaatttatgtctttttcctcatttctatgttaaccacacagtttcagcattgatgctgacgttgactaactcagcagccgagaacagggctgggaacaggagggaatgactgactccccagcagcagcccacgtggggacccttgtcagaggggtctggggtgctacaaaggaggagcacccagccagggctgggcggccagcagggacagaaggacgcaggactctgcacggctccacagctcacacctcaggatttcacacacgcacaaggagcttccgagacagaagccacctgaggctgtgcccatcggggtccccttcttttaattttgcattgcagtcagccccgggagttccaatggaagcctctgctcagagatggtcagaagagcctccgagcccatcactgtgggctggggcctggatgtgcactccccagtgttgtgaacactctcggattccatgtgtccctgcacctcacagtttctggggccaagcgagtagtgggtttgaaagttcccagagattctgagccaagatggggtatgtgttgcggacttctaaatggctagggaagggaatttaaaaggaccagcctgattcctcttcaaggaacgtgtggagctggagctaggccacatgcgctgctgaagtggtgggtaactggaacagtctgtgtgcttgttcacaggcgccgctggccatacaaattagcacaacaggacaggacgctgtctgcagaaggaaaaggctcttgcctgtatgatgtttctaacacacggctaaggtggccagagaagacaggcgtagcgtgcatgctctgatggaatttataaccgggagcatataaatccctgtttgtgacgtagaaaaccgtgaagctggatctgcctggaaatgctaacttctgggagcttcacatttttagcctatactagtgacgtgcacttaactttgaaatttgtttcagaaaatgaggcctctacaaggaaaatcatctcggcttgaaatggatctcttgtcccacagtggctgcctcggtgtactgttaccgtatgtggtagagacggttcctaaccaaacgttcagtttgtttctctttaagaatataagaaagtaggccaggcacagtggctcactcctgtaatcccagcactttgggaggctgaggcgggaggatcacctgagatcaggagtttgagaccagcctggccaacatggtaaaaccctgtctctactaaaaatacaaaaattagctgggcgtcgtggtaggtgcctgtaatcccagctacttgggaggctgaggcaggagaatcatttgaacccaggggcagaggttgcagtgagccgagatcatgcgactgcactccagcctggcagacaagagggagactttgtttcaaaaacaaaaaaaaaaaaaaaaaaaaaaaaagagaatataagaaagtataaacagagtgaaattaattcattaacattaggaagtagaaactcactctaacgtgacccacgctagcatgagataccgtgtaactgtactgggtctggatcccccacggaagcacttgcagccggaccaccgaagggctcacgcaggcccatcctcccaccacgggctcccagcactggcaaaatgccactcagaccacagctgcaggggcctccccgatcctggggctgtttctgtaatagagtgtgttttgtcaccaaatgatatttattttgtttcaagcattatttccaatgaacaaatatatgctaaatcaatcggcatgtaattaaatagcacatggataggacatgcgatagaaggagggggcagaggccgtggtgtttctgacgccgcctctctttaagggtggctacaaggacgtgagctggagtgaccgtgtcagacagcgcggtagaggccagggatggggctgcacaggatgcccacaaggcctcgtgattaactgttttttatttgtgcaattacttcttttccttccttagtatctttcttctaaaaaattcaaagaatgaaagagggcgcttaaattattttaaatcagcaggattttttgaggtcccatcatagacaagacctatattgagcaaaccaggctgtagagttagtgttcagtggaagatggtgagcgggctgtgtcccctccaagtcccacctggtctcagggaccccacatctgcaggcctggctgtgcctggcaatgccgggggagccgcgcagcatgaaacggaccctgtgctcggtcttgaggccacagctcggccttggtgtggctggggccgcacagacacagcacagcggcccccggcatccgcaggacacggttttccactgttttaccagtccctcagcttcgccagacatccctggatcccagaccctgctcctcaggtccagccattggccgcggtcctgctccaaaccacaccggccatccaggacccagattcaatgcccagccctgaggcttctgcactgcagctcatcctcttggtgagagcccaagctggggccctgtgtccttgttgagcatggtttgaactcaggagcatctgtgtgatggccagagcccaggtggggtgaccccagccccagtgctgcccgttattgctgccactgtcattatcactgtggctctgtgagttacacctgtgcttctcagctactgcaacttacctccttcagccaacactacacatacatgagctccagggagggtggccttgtgcagccatctgggtagagacgcagaaagacttcttacagtgagtgggctttgcctgaactgagctctcagagatgagggggtgagggggtgtcccaggaacaggtgatgcctgggcagaggccacctgcagctctgggttgcggggaacgtgagggacaagaggagagggaggggcgagggcacagaagtggggtttggcctgcatcctacgtcccgaggtcactgtgggcttgatagtgggtgcggagaggagaggccggcccggggtcatggtgaagccgtcaggacagaagcagtcaggggctggggcagccttgcccaccatgttgggggtaaaatgcaccatgtgctcctcctctgacgtggctgtctcagctcccaaagcccaccagccaacacccaatgattatggtagaaactgatacagaaacggaataggtaagaaagacaaaagtagggatcctgtgtcaagtctaagggagtgcacaggagttgtgttttgctgaataaaaagggaagaagcctgagccactgggatcactgcaataaccttcttcttccaaggccctggtcctgccggaagtgtggatgccgtcctcactcaggctcccccgacagccggagccccctctatagaggaggctgttcctagacggacatcgggtcagacggtttttgcttaaggtaattaaattccctctaccaccctaaaaataattccctctccttgagatttctatacttaaaattcttaaaggcatttattgccctgccttagttgctgctttaccaagacaaacacacttagttcctttccacttttctcacaaacaaatccttcagtctcttaatcatttatgttgcttttctctgaatttcctccaatttgttgacatcctctggtttctaaggttctaatgcctatatttgctttgttagaacacagcaggtattaggaaagaattggatgctattcaagccacagtaattataagggaaaacaagttcaaaagccttgagtgaaagcagcaggtaagagggaggaaacatggaagataatgaccaatgcatataatgcttttctaattcaggacaagaccatgagaaacttcatcagtgatgccggcaaaaaccaaatacctaaatagatacataaatgtgtgtgtatgcacccacgcacacgcacacacacagaggatatcattttaaaaagaagggaatatatcggtaattagcacagaatataaatctccccccgagagatgggtgcagaaggacagcactgtgaggacacagccagaaggcgctgcccaccagccaaggatagaggcctctggaagagccagccctgcccacatcctgatctctgatgtccagcctgccaaccaaggagaggggcctcgggaggagcagccctgccccacctcgatctctgatgtccagcctccatagtggggagaggatgaactcctgttgctgaagctgcccaggctgtagcattttagtccaccagaaaagaccactacatcggccaaccctagtttcaataaaactttatttactaaaacaggtggggctgtccatgggttagaatctacccacctctgtcctagtaagtattaaaataaaaaatgaggtgacctcacaaggtccctgtggagaggcagagaaatggctgctgctactgccctggctgagccgggcagcctcgcccatccaccatgaggcgagaccccacactccagctggcctcctccctgaagggccagatgggtgacaggtccccagaagcttcggtcttgggcttgtcctggtaggaaaggttttcccagccaagtgcatcctctgcttgtcagcagcttccacagacatggtgagaggagacattcaaggatgaatttaaattgtgaaactcaaggggcatcacctgagtgcttttactttccccattgctgaccctacagcatgatgactccgtttcctacacggttccgagcgttttccatccttcctgacggcctccaccacgagacttcaggtcatcctttaatgagggcccaaggaagcacccccactctccagttccatgatttcccacggtgattactgagggaagaccagcgcagcccatgatgtgttcacagccaaggccccggcacctgggcactctggggcagcccgtaatgtgttcatagccaaggccccggcacccgggcactctgtctggggcagcccgtaatgtgttcatagccaaggccccggcacccgggcactctgtctggggcagcccgtaatgtgttcatagccaaggccccggcacccgggcactctgtctggggcagcctgtaatgtgttcatagccaaggcccaggcacctgggcactctgtctggggcagcctctggcttttaatgatgcagcaaagcatcaggctgcccacgccagaaggctttcccccacggaggcttccgccatgagtctggaatgcgttctgagcacccctggagcagggcactgttgggttacttgaaaaataggaagaaaaagaagacaatatccctggaccttagaaacctcaatgatcaagagtagcgtttccctccacggttgcccaatttcaccttgttctgcaggggatggcaagagcagggtcgccctggtgagtctgaactctgtgcactcctgtttagtcctcaatgggaaatgggaaagggctttgttttcagtgtgcatttatccctgataaacaaaaatcacggcacaaagcagaacggtggctgttttcttgtgactcattattaacaagttttaaactcattcatcttggaaaactctcaacaatttagcacagaaaaccactttaatgaattcacctaagcccatgtcgacaaggagtagccagaagccaatcctggtttatttctccaacatctcgctaaaggaggagctcaccacgtaagcgctcccaggcctgtgtcctgggaaacactgacagacagctctctcagaccccaggtgagtctctgctctctcagtccccaggtgaggctctgctcccatggctgcactccgtggccagtgctgctcccaatatctgaagacatcttggcctctactgtggctgtgtgtatttttctttgcggtaattaacactctaaaaaaaatttctctaatctatattttgaaataactcaagcagaagttttcaaacacgcacattctgcagcactgtcccatccactgcaaaggagaagagccgaggagcgagttccttgttctgctcccttcttgcggtgtcccccactgcctggactacagtatttcctgaaactaaggaagacagttgcgtagagaccctgagcttgcattcagcagacacacacattcttaacctatcttgaaatgagtaaacaaatcttcatgcccagtttgtcatctcctccttacccttgccctcatcaagccactcagtcatgtcagtccctcctgagtcatgcacatgcatgcaggcacacacaagcaggcacacacatgcaggcacacacacgtgcaggcaaacacatagggcctggcacagacatgcaggcacacacacgcaggtaaacacacagggcctggcacacactcgcaggcacacacatgcagacacacatgccggcacacacacagggcctggcacatgggttctatatttggtagataccaccattacctccaaacagagctgctaaccactggtatctatcagcagtttcaattcctcttgatgtgtgagggtcattttgtcttctatgacaatgccaaacacaccccagcaaagctctggggtagtgtgaacatgcccagtgcaccccaacaaagctccgggatgttgtgaacatgcccagtgcatcccagcaaagctctagagcggtgaggttccgagtcctcactgctattcagcacttgcacatcagaaacccaggcatctggatggccagtgctgacttaattgactggtcagtctcagcaaacctacagtcagttccttccaagaagcaaatcaatcagaagaacacaggttccctgagctgtccactcagctgaaataatcgctctgcagccctccgtaacttcaagatctctagtgaaacacacacatttagatttttaagaggaaaaaaatgccaaaatgattgccaagacatgcactgggcattccctgggcacacagggcacccgtgcagctgtgattctagggacactcgctgcccacgtcctccacaaggtcataggcattgtaagccaggagtgcatcctaggccctccaagaagacgaccaccaggatgtggctcctgaccccatggggctgatctgtggggcagaaactaagacaccttgtgacaaacaagcaatggaagagaaaactgctttaggagcaggaagggggccaaggccagcttggcaggagctgatgaaggctttccagggaggataaggcatgagcaacttcagttgtgctctcaacattgacctcaattcctttccactgcctctttctgctactgcacttagaaaaatgtcatacacacaggaagttttcaataagcaacaaaatttacctaaaaaagaaaaaggaaaacagaaacgaaaagattgagtggggtttggggcctgcagagtccttgtctgcttgattgtgggcagtgggtggtttgtgaatgtcagaataagcttttcttctcagatgggtaagcgggcagctgggctttgcagtgacaggtgccccgaggaaagcaggcaaacatgcactggacaaagacacatgcagccctattctaagaaggacttgacctttgagtctgaaaaacaccctgcactttaggagctcagaagagaaaggcatcatttcagagtgggagagccgcgcctccttgtcagtgtgatggttggtaactagattggcaggtaaagccacaatgcagttgatgtaccctcatctgctctattattaaacatccaaaatacattgttaatattttaaaaagcagacaaaggcccccatggtatgatacaactggatgggtgtttgttctcggccatgctgagagatactgacatccccaagtctctcctggcacccccagcacggccgccttccccagaaaacaatgtcagattttagaggctgaattgtgtggccaacttggtttacttctttaatagccctgtgggaacacaactgcttatatgtgacaaggcctaactccacacagaacaaacacgagtatcaaataacctcacttaagctaaagaaacacacacatatgtgaccaccttgggggatgatggctggtgtatttgtatttccctgctcagcttatcagttggatatcggcaagtaagatttagaagcagaaacataaaatattgaacaaaaactaaaacacttataaaaaggattcgctgtgtggtgtgaagctttgtgcagtaattgacacaagatcagaaagcaaaccctaagaaaagcggcacccacactcccagcgccaggccagggattaacgagcccggcagacaattccaatccggagtgggatttgctcttccgtttacgttctattgtccgggtcttatttttgctttcaattccttttgtaatggaggtagcagttgttattgacaattaataggggcttcaaaggcagtcatgtttggaaggggcagcggcttccctaagacccctcagctgctgctcaggtgcagctgctctgtatgccaagcacggcccatgccgggccccgtcgaggcagcacagatatcgatttagatggaaaccggggtcggcgcggagggaaggagctcggtgagcttcgcatgctaatgtattatttaggctttgtggtttcatccggagtaagtgcctatttaggaaaaattacagaatcagtatctctgctactgatatattttccctaacagtaattcacaggtaaaataccagggatgatggaaggtatttgtgcaaagattcaggaggagatggtctgatctggtgggctgggctcgctgggggggaccataataacgcaaagcaaacaacatccatgtgggaaggtccactggccgaggacgggcaccaaggctgccctcagatgccagccggacagcatggcgtggattttggcgaagctgagtgatgcatgctatatgcatccttattgatcgaaattattctttttactcaaatatttacaatgtaagataattccttgtgttcatagttcttacataatcatacactaaaacaacttttaccaattaaagacaaaaccgagaccctcttccacgtgagatggtacaggagggagctgcagtgggcctggctgtggggagcaccctggccactgtttcaaagctgccccctgagccccacagaggtgccctcaccccacaaagcacttccactcagacgtacaggacaccgggaggaaggcagagtgccctccacgtataccgtgacaggtcaggtgcaaggaggccccatcaagaggcctgaccacacggccctgtcctctgcagggctgcgtgaacacaggacacacagcagtgatggtccagcagccactcggctctgggcactgtgtcagttggcactgccctaggtatgctggtgacaaacggttcaaatgaccccaccatcgtgacactcgacccttttggcccaggaactgccattcacgggcacagcacacctgctcctcccataccgaacctccatcatctccgctgaccaggcaggtccggggtcctagaaccaacagggctcacccaccccagccccaggcagagccggcccctgtggaaagtgcccagccacagccaggactttacccacatgcctaggccaggccctggtcatccttccacaggtacgtgaaaggtaaatgtaagtggcaggaagtcaaatggaactgaaagccacctcgtctcctggcttccactcagaagtggtggaggaaatactctcaaatgaaatcatgtgatcctgtttaaataaatggaaaattaaaaggcagggcactggctgacccttgatgccaggaggggcagatgtggattgacgtggctctcggcccccatgggctggtattgggcctccttgggagcagcctgagagtgctcattcttggccaaatcgtgagttccagagggaaagagatgggaccaaaaaccttagggagaaccttggggccagctgcagtgggaacacatgggcaccctccacaatcctctatcctgacacgatgctccttttgtgtctccactgtgtttttcactcccatattttcacagttgtgattcaacctcaatgcttctggaacccacaagccacccagcctcactttctaaaaatatgattgagaaagcaagacagagtttgggacggaggtttctccagcggagcagagccctggcatcctgtggaacatattgtgagtgttcacagccgagaaagtaagatgactgggatgtcattttcaaagaggaaatgggccccaccccaacagggccaccgagggagaatcgcaggaggcagctcccccaaaactgggagaaggtcaggcctgggttcccccataccgtcatggtcttgagtcagaaaccagagatttgtaaacagcatcaaaagccttcacttccttctgcagccttaaagtttgaactttacatacattttagacatgaaaagtacaccaagaaagccaccatggtgagttttaggcagagaccctcttgtgaataattcgtctatgatccaagatggccagacaagaatcagggcccaagctttttctccccagtgtcacatccacgctgttgtctcctctccagctcagaccaaaattctctggacattttcatggctgaaaaccccaccagaacgctggccctgacaggaccctctcctcaagtcctgaggacccggctgcggccagccagaatgtaaactacagctcgcagaagcagcaggcatggaggaagaggcaggagagcaagagcagaagctcgaaaccttcaaagggagcctgaagaacaaggccaggagaagcagcggccaggccccaccggtttcctcctttccctcctgaatctaggacagaggccatttcagacgagagaggaaagaacaacaaaatgaactgcaggagaagcagccagagcctgcaaggcccagccagagacggcagaggagagaaccgcaagccaggagcaaggaggagacaggtggactccactaaccaaccgacgcagcccagcggagacaggcggactccactgaccaaccgacgccacctggagaaagtaaatatttaactgtcagaaggaaaacactgtttgaacagtagtggccttaggaagaaggccctaatttttttgaacactgaccgggggccattctttacccagagctactatgtcccgcgcaaggcaacactggctgaagcccaggagggcggggcagctgcagaccctcaggagcctctgctggctcagggagcgtggggagagtccagcgtgcaccagaaggagggaggccacctctccttgcggcattaggagaccagggtctctgaaagggcggggaccacggccaggccagaaccaccacatcaccaggctgaaggctggttaacctggtggaatcagctgtcttcatgttcaaaccagcacatggggctattttgctccagtcacctggtgtgacatgagccactgagactcgaacacccctgctctggagcaaagaagaacccacacctctgtcctgcctggcagcctccccaccactcgccgtgggcacggggtccgtatccactcgccgggggcacggggtccgtatccactcgccgggggcacggggtccgtatcctctcgccgggggcacggggtccgtatcctctcgccgggggcacggggtccgtatccacttgctagggcatggggttcatatcctgtcctctgtctcctctaagtgtcccttaaacttaaggccaatcctatgatttccctctaaaagcattcttccgaattctaccccaaagaaaccagtgacatttctcaacatcaggcttcctaatctctgcaggccgcctgaagaaaaagaagagatatgtgtatggccatgccatttggaaatagaagaaaagcctttaaccgccttctaccttcagctgtttttgccaagcagagaaggtccagaaagcaccttcaaaggggctgggagctctggccctgcccatccacacagcaaatacagcaagcagaaataacacgttcacaggggctggaggctcctgtcctgcccatccacacagcaaacacagtaaccagaaataacacgttcacaggggctgggagctccggccctgcccatccacatggcaaacacagcaaccagaaataacacgttcacaggggctggaggctcctgtcctgcccatccacacagcaaacacagcaaccagaaataacatgttcacaggggctggaggctcctgtcctgcccatccacacagcaaacatagcaaccagaaataacacgttcacaggcttctcctccccactcccaactcagctgcaaaacagctgataaaatgaggatgggctctatgtaagtaaacagtactcgatctaccagtttacgacatcatcaaagacatgtagagagaaaatacatacacaggtaataataacaatgataattctaatactattttgttagattagaagcatttttcctggacagaagcaacatcacctggggtcccagtggaaagcacgggccaggcgtgctccctgtgaccaggtcagagtgcagagcccgcctggtgacctcatttccttagggcaattgtaccttctgtctggagccaggtccctcttaaaggtagaagactgcagaaaataattcaccagaagcaggcatggtgcatccccaggacggatccttcaccgcacccgagaacccgcaggatgaggcagctctgcgcaagcacctgaccccctgcagagctgagatggctgctcggggactatgtcccccagcaaagcacagagctgagccagctgcttggggactatgtcccccaggaaagcacgtctgagtcttggctccagctcctgtgtatgggatgtgatttggaaatggtctccgaagagggaagccagttaaagatgaggccatcagagtggctcctaatccagggactggtgtccctaagaaggagacactggacagagacagaagtgcccagtgggaaggcgaggccagaattcccgagaacacctggtgacccagcagaggtgggagggaggcccctgtaagccgaggaatggcaggggtgtcagggccaccagaggctggaggaggcaggaaggaccctctctggagccttcagagatgcacggccccgctaagaccttgatctcagaccctggggggtgcagggcctggagagctttgcactgttctaagcctgccagtgtgcggggctccgttgccaaagccttgggcactgcacgcgccatctcagaccctctggccccacacagccagagctcagcgatgagccaggcccacagctcttcctcagggccctcgttttctctctctgcaagccttctcctttctaaactgttgttgctaagtcagaaagagaagagaaggcatcacgttgaataatatcctcgagtgataaatctgcagtatctgctgaaggtccacagataatgtgtttaatttgacaaaccagggacaagaatgatgaataaaacactacttgctgataaactggaccactgtggcctttaatattttcccagtcttcctgggttttctaaaatgtaaaaacagagctgaatgtctgttctggaagactgtgtgatctgacagacgacctcgatctcaccgtgatggagacatcaatggtgaggtcatgacttttgcaccttcctgaattttttcctgcatccctgtactcactcatttccagtatctgacatttggggtctatttggttttgaaggaaagacaggtctcaccagagggtggagcaacaaataataaagccacagaaatgctcttaattgtcataaaatattcatttataaccaatatgtttgtgccaaattccgtcactctgtgagaatacagtgtacccaagtgagagatttagaaagccctttaagctgctttttacttgttaaatgaaaaaatataatcattaggcatattcaggaattgggaaattaatgcttattagacttcaggaaaaaaagaaaaagataaatggagggcaagcagaggatattctccaggaagacagcctcagccacactttccagaaggcatcgtaatcttcagtggatgttatactcatttatattttaaaaaaagaagaaaggttaagagctggtaaataaagtgacagataaagtcagaaaaacaatttaaatcatcgagtaaaaaaggtgggcggaagtcagacgcgggggctgtttacagcagcctcaggaagatgcattaattacagtcgctgcaaaactacaaagacggtgctgctctgcagccggcgctccgggggcccgcgagcctctgaagtctctgggtctcctttgtttcttcttcatggtgcagaaggacatggtgagcagcccagctctcactttcaagggacctttggctgttttctccagcactgctgagaaagaagagcagccattctgggggctgctcaggccccggcattccagctgctgtgtggagtcttcggcttccctttcggaaacctgcccccacgcctggccctggctaagcaaaaagccaaatggcattgcactcacatccaattaacttcccattttcagcaattattgcttcgccgggagcagcaagatgccctctgtggggaagcaagggcccaggaaggggtggctgatgctctgatgaaggcccctcctctgacctctaggccacattagagacagcacagcccctggccctctcctgcccctccttccccggctttgaaagcagaggtgctgcatttggggcaagttctggtcagttctcatggtggaggagaattaaagttcagaggagggcaaaggcaaacaaaatgacaggaggaaggccggatgcagtgagtggctcctccgcctgagagacagatgccaagagacccaaggcaggtgaaaaagcgcctctgatgcacagagacgttccgtatgcaatagactcgggctggacaccgagaatctcaactgggtcaattcagagcaaaggacgcattgtgcagtgagcagtgaattcatacaacgctaaatgcagagattctaaaatggcttagacctaaaatcacagagcaccaggcatttggctccactgaccactcagagggacacatgcagggcagatggggcttaatgacatgagcagagtaaacccaggaccacaacggccccacgtccagcaccgtgtggaggacggtacatcttccatgcctccaggttttcaggagaggagctctgctgcaccacgctgggagagatgaataggctaagcttattgtcaaaaggcattactgcagaggaagggaaagtctcattatcagaaacctcaatgagttgtttcttcagatgtgcttacccagtaattttttttttctgtaagtcgctcactgatgcaatcagccaacttctgtctcccaggtgctgtgctcagagaaataagaatttgctctggagtcagaatggtttagggctagaggcatgaatctgaaggatgtcagcctaagcggcagtggccaccaagcctgacagagccattgggggccacgaataaagccttggtgcctggtggtggccaccaagcctgatggagccatcagggccacacatggagctgtggtgatcttcttgactacctgggcagtggaggaggatgtgggacgagagaatgaggaagaaacgagtcggtgattagctggaatgataagtcgttttagccatgttgtgtgataaggagtttggctagccttggtcctgttcctggaagcagcctgagtccttgcagcctcctgagtcacgggagtgaggtcatttgtggtgggcccctcggaccacacctgattgtttatgcaaatgaggtgacaggacgggggctgtccacaccaaaaagaccaacaatgtgatgggtgagtgggggctctgagccgtgggatatagtctgatctcaggagaggggagggctggtgggtgggttaaagcttgtggccaatggttcaatccctcacaccaatgtaatgaaaccttgatagaagctctgcatgctgaggcccaggtgagcatccctggtcagcaatgctgtgtgtggctggctgcacactgagacctcgatagaaactctgcactctgagacccgggtgcacatccctggtcagcaatgctgtgtgtgtggctgactgcacgctgagacctcgatagaaactgcacactgaggcccgggtgagcatccctagtcagcaatgctctgtgtggctgcacactgagaccccattaaaaactctgcatgctgaggcccaggtgagcatccctgcccagcaatgctgtgtgtgtggctggctgcacactgagacctcaatagaaactctgcactctgagacctgggcgagcgtccctggtcagcaatgctctgtgtggctgcacactgagaccccattaaaaactctgcatgctgaggcccaggtgagcatccctgcccagcaatgctctgcgtgtggctggctgcacactgagacctcaatagaaactctgcactctgaggcctgggtgagcgtccctggtcagcaatgctctgcgtgtggctggctgcacactgagacctcaatagaaactctgcatgctgaggcccgggcaagcatccctggtcagcaatgctctgtgtgtggctggctgcacagtgatgtggtttggctgtgtccccactcaaatctcttcttgaattgtaactgccacaattcccatgtgtcatgggaagaccccagtgggaggtacctgaatcatgggggcaggtctttcccatgctgttcgtgtgatagtgaataggtctcacaagatctggtggttttataagggggagtttccctgcactttgcctgctgccatccatgtaagacgggacttgctcctccttgccttccaccatgattgtgaggcctccccagccacatggaactgtaagtccattaaacctctttattttgtaaactgcccagtctcagatatgtctttatcagcagtgtgaaaaaaaactaacacaggctgggaggggcccatgctaggccaagatctggaaatcagggcaggtgtgtgagtgtctcaccctgagtccagcacctcagtcccccaaacacaacagggctgagtcgagttgcatcgtagctgaggcctgggccacttggggtgtaagagctgggagctgctgacagggagcagtagcagaggcttcagctgcaagagagtggcctgaattcggagaagcagactctacttttgtggggtaggctttgtgtgtgcacacaggagcctgcctgtcagccaaaaccctatttgcaatgcttccctgctatctgccctgagcaaaacattagaaagctgggatcaatttagtaaattcttccaggctcactctccatttctttaaaactccaaatcagaacatgtggcctgagcttaggaggaacaaaatttgaaattgtactgcccagaaaacccagtgtggatagtcagtgtgtttacacgcatcgtcacgatagtgtgtttacacgcatcagcatgacaatatatgcacttttaaatactctcacttcatagtcaacaagtgtctcaagtataaaactataagaagagaagaaagtctagagatgtccatttcgagcacacattgtaaaaacagcacagaccctgctcccagtctaatgcataaatactgtaaataaaaagggacaggcacaaattttgaagcattagtaaacgtgaaaggaaggaaggagaaatcccagatgccagaacagagaaagcacagagctggggcaaagagcaggcaagggaggcagctgagtgtggcagtggcaggcaggggggtctgttagggcccagcaggctggggttggggtctgcccacaggagggcagggggcaggtgctggcagcgcacccccaaggactgtgcatacctgccctgcacaaaaggaatgccaacaacccgtccacaggcaggcgggcagaagagcctctctttctcaggctctggatgaaaacacaaatgcctctcattagaaatagaagcctgaacctgtatcccacatgagtgtcaaatcctaatataataaaatactcatatatctaacataacacattgatttgaattgctaattataaaatgttggaggaacctttccaacaatgagagttcttgggacttccacaggattctcataagaaaagaaagacatcaaagacaagcatgtaataaaaaattataaaccacgtagaaaacaatctgtaatgagaaagtgtgagcaaaatttaaaagaaaacgcaaactagagaattaaccccatctgacctggagataaaatgatagcctgagacttactggcagaaattaacaaaccagaaagcagcagagagcacagacatgagcagagttgactgtttaaaaatatgaaggaaatacaaagatgtctgtcaaaattatccagaaaggaaagatgcaaaataaataacactagaaatgaattaggggcataacaataacatatacggagatatgcaaaaccacaagaaactgcaacgcacaacagaaacgtaattggaagacataagtgaaatgaatcatttttaggaaaaaaaacaaaaacacaaaatgccagaattgaattgaaaggaatggtatctgactatacttgtaaccattagttaaatcagtattcaaaaaccaactctcataaacagcactaaagccaggtgacttaaacactgttactaaagcttcaagcaacatctgtttcctcctatgcggattttagatttttcagtctaggacacaatttactttatgagatgagtattacttcgatactagcactgaaaaacagtaacacaatgaaaataagggaattccatttctcaaaaaataatagcaaccaaatataacagagggaaatcagtaaaacaaaaagtgaccaaaaaggtatatcccaaaaatgcaaaactggttctactccatgtaattcactttactaagagattaaagggagaaaaagtccagtaatatcttagagattcaagaataagatttggtccattcaaaattttttaaattttaagaaactaggaataaagcatccttaacccaataaaagttatctaataaaatccttcagaaataatcatcctttaacaaggtaaaatgtcaaagacattttcttaatgcttgggatagataatgaagccttccttgacccctttgattcaacactatttggaacaccctagatactcaatgcaatgacaaatgttaagatatacagcattagaaaggaagaaagctgcagatgacatatttgtttacatggacaatctaagagaactgccaatcaagcaattataacaaatataagattccttcaaagatacaggtcacaaggtcaaaatacaaaccaatgtgcctatatgccagcaacaaccaattatataatatcttgaaatagttagaagttaatttaaaaataatcctgatcatgttaagctacttcaaaaaattttaataaaatattttaagaactttacatttaaaaatactaaaagttcattgaatggcaaaggaatatctcactcagcgaagacacatgccatgtaagtacagaagtggatgggaagaccaaatgtcgtaaatacactctcaggtctcctaaccatggggacatgttctgagacatacatcgttagctgatgttgtgccaacatcacagagtgcacttacacacacccagctggcacagcccactgcacacccacaacctgcacggcatatcactgtactgagtgctgtaggcaattgtaaccaatggtatgtatttgcgtatctaacctgcacagcttactgttactgttccgagtactgtaggcaacgctaacacaatggtatgtatttgtgtctgaacacatctaataaaaaaggtatagttaaagtatgtgattataatcttaggagaccaccctcatgtatgcagtcagtagttgactgaaacgctgttatgtggcaatgactgtacttttgtacagttttgtccaaactaaactatacattaaatcgaaattcaacaaaaaacccaatcagtcttttttcataaatttgacaagctcatctgaaaaatgattttagaataagggacatgtagataatttggggaaagaatgggggagggttgcaattcaccttgtcagaaagatttcacattgtcagaacgattgagacaccaagtgtctactctgtaccacagcaggtgagtatcacagatgtatggtgagttagagaagccagacacatggagtgcatgatgtctgaatccgctaacctcccgctttgggtctcacttgggaggagatgctgaggggagggtctgggctgccaagggctctgtctggagctggatggtgactacacagcacagtcaacaggctctgcactaagatgtgcacactttgtatatgttatactccagtagaaattcatgtataaagtaagatgagaaagttgaattgagaaaagaaaatcatcaaggttttggaaagactgacaaacagaaccagtggaataaaactgaggagggagaaatataagtacacacatggggactggatagacaaccaatgtgaagacatacactgcaggagaaagggtatttcaacaattaaatacaagggccaggacaactccctatctaagtagaaaaagataaaattcaacccctgtctcacaacaacaaaaattcctgacagattaaagattctaaaacttcagaagaaaataagggcaaatatttttatgaaatcactagagaaagatgccatgatgaaacccaaagacttcaaatggaaaacactgattaaaaagacaccataaaaaagataaaagataagctatatctctatttttataacatatataatgcactgaccaagaactagtattcaaatataattacatacattttataataaaatactatgctatatataacacatatagcatttctatataaatatggtctacatatatatttatatgtaacatgtatatttatattatataatatgtagtatttatattagataataaagtataaaatatagaaatataagattatacataatatgtaaaatatgtatttctagaataatgacacagatattaagaatccttacattctaataataaaataacaaaaaaaaacacagcatgaaaattgaagtgttcaaacaagcaattcactaatgaggaaatttgaatggctaacagagctatagaaagctgctccaccttatttgtctgccagatacagacaaatgaaaattgtaataagatacaagtttatggccctccccctttggcataaactaaagagaggtctgataacacctaattaaattatattgtggggaaatagaaaaaatgtaaaaactgcctaaatatcctgcagtagaggaagaatgcataaattatactgtaataccatgccatagttacatataaactagatctaaaggtatctgcgtggataaatcctcaaaatataattctgtgtgaaaaacacatcttgaaaggatagctacagcatgaaaccagtcatgaaataagtccagaatgttgtgggatggaaaatacccaattccaacccatctggccttcctttcacttatgggaggaaaagaaaaagctgagaagtcctcttgaggtcacagcccaggtgtgcaggttcaggctgagacagagacctgatcacagggccagaggatgctgccctccttccacaccagaccaccacatcaataccaacagggctcccacataatgacaggggattacagataaaagaactgcacacatcagactttatttaaggagaagtctctagggaaacccaaagaaaagtagggagataaaacaaggacaccagaagaaattttagcctctgacaattacagctccagcaaacagtaaacagcctaactcacagccaggtaaagataaaacctaatgctaaaggccaatctgcctcagtttcttttatccaatacagcatatctaggtttcaacaaaaaaattacaagccatgctaaaagggaaaaaaatcacaaagagaaaaagaatcagactcagatatagcagagatattggaattatcagacaatgaatctcaaatacccatgatgaatatgagaagtgctctagtgagaaaacggacaatgtgtaggaacagatgggtgatttgagagctggaaactctaagaaaaaatcaaaaggaaatgttagagatcaaaatcactgtaacagagatgaggaatgcctttgatgggctcattggtagagcagacatagctgaggaataatcagtgagaatgaggatctatcaataaaaactccccaagacaaaaagcaaagagagagagagaaaaaaaaagaaaaagacaaaacagaatatccaaggactgtgggacaattacaaaaggtataacatatgcataataggaataccaggaagagataaagagaaaagggaacagaagaaatatttgaagtaataatggctgaatattttcaaaattaatgccagacaccaaatcacagatctaggaaactcagagaacaccaagaagggtaaatacaacacacacaaattcacactcacacacacagatgcacacacacggacacgcacacacatgcatatacacatgcacacacacacgtgcatacacatgtgcacacacttcacacacacacacacacaaacacactgcacatgcacacacgtgcacacacactgcagaaaaatcaaagacaggaatttttggacaaagccagagaggggggaaaaaccttaccttacccatagaaaagcacggagagaattatgctggacttctttttaggaagaagcgagtagagaatgaagtaaaatattgaaaatgttaaaagaaaacacccaacttaaaattctatgtccagtgaaataatacttcaaaactgaagaagaaataaagacttttttaggcaaacaaaaattaaaggaatttgtcagcagttgatctgcctttctttttttctttcttttttttttttttgagatggaatctcactctattgctcgggctgaagtgcaatggcacaatctcagctcactgcaacctctgcctcccaggttcaagtgattctcctgcctcagcctcccgagtagctgggattacaggcatgcaccaccacacctggctaatttttgtatttttagtaaagacagggtttcaccatgttggcaaggctggtcttgaactcctgacctcgtgatctgcccgcctcggcctcccaaagtgctgggatcacaggcgtgagccgccacgcccggtccacctgcttttcaagtagtgttaaaagaagctcttctgacagaaggaaagtgacacaggtccgacactcggatctaaacaagacacagcagataccagggaaagcattccaggcaccaccaggaagagccactgcagaggccctggagaatcctgcttggcatgtttgaggaacagcaaggaagccagggtacttggaagagatctactagttataaagggaagttcacagcaagaatacaaatgcatcatctgtattatcaataatagcttattgctttttttctaagtagttcttaacaacattgcaataaagaaacaattgaggctgggcacggtggctcatgcccataatcccagcaccttgggaggctgaggtgggtagatcacttgaggtcatgagtttgagaccatcctggccaacatggtgaaaccctgtttccactaaaaatacaaaaattagcctggggtggtggtacacacctgtagtcccagctactcaggaggctgaggcaggagaatcgcttgaacctgggaggcagaggttgcagtgagccaagatcttgccactgcactccagcctcggtgacagtctaagcaagagagagggactatgtctccagaaaaaagagagagaaaacaaaaagaaaagaaaagaaacaattgaaggctacaaatagtcaatatttagtctcttgaaaaatctatggccaaagagaaacctgcgtgcttgggtccaaaaaagcgaaacgagtattgcatgatcttggtgattctgaggccagctctaagtctttgctgtcattgacatgtgacccttcccaatcacacttcttcctacccacggctgagtctgtggtgaaaggacagacttccttcagccatgtcaggctcctttactatccttgtatcttgcaacactcttagtaatcacatcattttgaattctttatgtaaaaatgtacctgctttaagcctcagcaaagaccaatgtcaaaagaaagatatctgtatcacaagaacgatcacaggcccagtagatcgtgcggctggacacgcactttctgcccacgaaagagcctgtgaggggcctccatctcgtgatgcaatgcaccaagatgccacgggcactgaaacaccagcttttgggtgcatacttcatacccacagaaaccagagaatggatttccaaacgtccagaaaaaagaagtcaggggagtgaaacgcagagaccaggagctcatccgactgccccatcgtgcttgactcttccccagcagaggggtcgggagttccggtggattcagtgttcccatcaatggtgagccgcttcggagcaaagccaaacacagctcagaactgcacaagttcaggcaccagacacagggtaggatccacgtcactctctgcagcacagggtaatgcactctctaccacacgcatgaatcatttattcagaaagagatgagagatccatggaactgtgaactaatcctaaatataacatttccatttactttccccgcacttaacatcttcgcagtatcccgtcacggctgagttcacgtttttgctgtgtgctgctggtatcctgcctgcaagcttcgggagggcaggggcaggccaggcccagggcttcctaagggacctggctgtcctgagccacagccggctgatagacaccatagtgaagaatccgatgggtgtctgtgacagtgtctcagggccagggtgacgagcatctgctgcccactgtgccagggaagaaagggagtactggcttgcagagacttacggctgaaactactagaaaacaggttttatgaactgcctctgaatttatttgtattatgctgttttcataattaaaagaaaagcttgtaacagtttcctcatttataaattccatatttcaatacaaagcaaaacactcttggaggttctggaatccttcagtgtgcaacgcatctgccattccaagacagagaccaaaaaaatggaggaaagtttgggggaagttacagtgaaaagctcctgatgggcgtggtggccatgcccatagttccagctactcgggaggctaaggcaggaggattacttgagctcaggagttcaacaccagcctcagaaacatagcaagaccccatctcatgaagaaaaaaataccaaaaaaaagttcctagtgataaaagtaatgtgccatgtggaggggaacactttcctctaatctaagggagcaaatcccaggttttaatcccatggacagaaaaaagtgtcacctttactaacaacattcttacctattagttaaatcagagatgtgtcctgggtgtagacatgaccagggacaggaggatcagggatcagggatgaacatcagagggactctcatgaccagggacaggaggatcagggatcagggatgaacatcagagggactcccattctcgtcacctgactttaaagggttggtaagtttttcaacaaaaatactcaccaacaataatatctccccagcaccaagctcctgcaggagagaatggcatttgggtggcagacatggccgtgaatgggaaggagaagggcctgacctcactgcaaggccgtctgcattaaagaggccaatttctgagcacaaggcaggttgccaggaaatgcagcttgacatttataaacctactcaccagcctttgttctcaatgccagggcacccaagtaagcaagccttccttcccggcactgcagacacttctggaaagacccaccatttcttcagaaatgacacttcacagtgtggcgagaggggagaagcgcacagaccatcctgcacagttggctcagcatttagcaattacataaaatgtgtgagactgattgtcatttgctcaaaaaatgtgttgagcacctaacgtacgctgaccacgtcactcgacgtggcagagggagcaaagcataaagagaaaggccacacgccgaggctgtgatgggcagtgaggatatgtaaatcttatgcttatggactacatcctgccacacatgattttcataaaagtcattaactcccaaagcaaccctgcagggtgtttcagataaaaaaatttagaatagctttatctgagttacacaattttaaaagtcagcaactgaagaaatgtccagaaagtcttggttaaataaaaaacacttaagtggcacagaggcaggagggggaatcctgaagctggtgcgtctggggagctcacctctggaggagaaaattgaaccagcagactgtgggcggccacagccctgaggcaggggtggggggcgtcctcactgctgctgaatctgtacaggactctggggccccttctccccgcacatcctgcacctgcataggaattcataaaaacaaagcaagcactccaatgtgtgtgtctttctttttcctactaaatgggaacgtgttggagcttggtctaaattatctgcatcaccaaagagagcacagtctccagggctcaggcagggtcagcctctggctctcaggcaggcacagagagctcggggcctcgatcatttgtaaagactctgctgcaaccaaactcaccagcagaggacaggctgcaggaggccacaggggacaaggagaacccgtgctgaagagaccacagctggtcccaggggaccaagatgggagctctgcctcagaaacagtgtccagggctcaagtggcccaggttaacatcttctctgctacttggaaaagagatcttttcctgcaccataggccgacaggtgccagttcggcgatgactaagtacaaaagagtctgctgcaggagcaacatttaattctcaacgagagcacctggaggacaccaggaggagcatcacagacaggaaaaattataaacagtgaagggcagccccaaacaataacaacaacttctcttccttagacacccttgagagttatgtcaataaccactgctcggttatattttacagaaagcctttctaaattaaaatatggtgctatccacttaaaccctactgggctgaacttacacatatgcatgatattgacccctgaattgatcagagattgatgctgaaaccacccaaaagcctccatgactggaagcttgatatctgacccggctttaaagaaagttggtggctttgggacagcagtcatgtggcgcacagcagcccattctttgtttccagcaggcagcaacaaatccgtgaggctgagctagcccctctgtcgggaagctccaaatggctggagaaataaattttttattaaaaaagtaattggaaagatgtttacattaatcagatttctaatttttcacttctccatggtaaagatcccagctatccagataaatgccactcagagcacccacatctcctggtggtcttggccttgtgtcagcattctaaatactcacatccatagcaagacatgagaaacaggaaggagaggaaagaagaatcagagaggtgtgccccaggacgtgggcgcagctggcacattcagagacggtctctgaattgcagatttcagagattgtttagcacagacatcctgttttatcatttgaaacctaaggaacagagagtgcaaagggcttgccaatagttggctagctagtcagtgagagacccaggagcagaacctgtgatcctggcgtcctgacactgccttgttctgtccaggagcagaacctgcgatcctggcatcctgacactgcctcgttctgtccaggagcagaacctgcgatcctggcgtcctgacactgcctcgttctgtccaggagcagaacctgcgatcctgacgtcctgatactgccttgttctgtccaggagcagaacctgcgatcctgacgtcctgacactgccgtgttctgtccaggagcagaacctgcgatcctggcatcctgacactgccttgttctgtccaggagcagaacctgcgatcctggagtcctgacactgccttgttctgtccaggagcagaacctgtgatcctggcgtcctgacactgcaatcctggtgtcctgacactgccttgttctgtccaggagcagaacctgtgatcctggcgtcctgacactgcaatccttgcatcctggcactgccttgttctgtccaggagcagaacctatgatcctggcatcctgacactgccttgttctgtccaggagcagaacctgcgttcctggcgtcctgacactgccttgttctgtccaggagcagaaactgcgatcctggcatcctgacgctgcgatcctggcatcctgacactgcgatcctggtgtcctgacactgccttgttctgtccaggagcagaacctgcgatcctggcgtcctgacactgccttgttctgtccaggagcagaaactgcgatcctggcatcctgacgctgcgatcctggcatcctgacactgcaatcctggcatcctgacactgtcttgttctgtgcactgcccttcagggactgaggcaatcccgcgatttctcatgtggcaggttctcagcaccacaccttccaccatgacctgaggcccagctggtttctaagaatgcactgttatgcagcagctctgggactaaaggatgtcgagactttaaaatactgtggctgcaggaaccaggagaggatgccgggctgggtgtcagaacacagggaaaagccatccctgttagccaccttggcatgctcttgagtttcctgaagcagatttcctaacctgacattttggagacggcaggacgggtttctcagcaataatccctcatctgccattgaggcgccgagctcttgtcttccttcctggtgtgtgtaccgctagctttgcaccagttccgcccactcaccaaaaagtccatctaaatccatccatgcttatttttaatttaaccttaatcctgcaggatcagtacaggggcaggcaatcaggtttacacaagggaggcgagcggctgcgagggaggcctggcctaaaaacgcccccgcccctcgccccggaatggagcctccagatacactcaactcaaaccacatcccattcctctctcatgcaaactcatctggtcacagagcatttgctgagtgcagactctgtgtgacacacactgctactttctgaggaacacacagatgaatacaacagtccccatgggcaggtttagcagggaagaagcacagtcaccgaagtccaaaaaagccaggctggagcccatgggccatgcagaacaggccaggagccgagggcaggtcactcagttccctttctctcaaggagctttcagctcaggagaataaacaaggagtatacacacatcatgtccaagggcaatcttagtaaccacaaccaaagaggctggagccactgcacacctcagggaaggagaggccacttgtgctgtgcgaggcctgcctgcagtcactgagcgtgtgaggcctgcctgcagtcactgagcatgtgagggctgcctgcagtcactgagggtgcgagggctacctgcagtcactgagtgtgtgaggcctgcctgcagtcactgagagtgcaagggctacctgcagtcactgagcatgtgagggctgcctgcagtcactgcgcttgggagaggaggcacggcacatctggcgtttcagagccgatggcatgttagaggccaccggggagggacagctgctgggcacagctggtgcactagaagcagctgaggtccattctgcaaaggagagctgaggctgggttgcacagcaaagcacagagcaacatgcagccagtcttttctcagtgcaaaatgggcaagccgggagctctcaagtgagtcagcaacccaccaatgtggcattacaggaggatgaacagggcagtgcaaggtgacctgggggtaggagtaccgagcacatggaacacacgtaaggcagctccttgttcaggcatgaggcaggaagagctagaatggggccgaattcagagcaacagggacaggggacccgatggatatcgaaggtggccaagaatggtgcatacacactttcttctaaggacactttctgtctagatagaaactcatacatgaatacacatatgtatacacacacacacacacacacacaggtcagtaccattctttcaacttttctgtttgtatattttcatcataaaatattggggaaatggtgccttttcatctctgcaatgtgagagctctatagcatcagaaactctccttatcttacagaccatgtagaaacatgtggggaaaagtcctacatgcatctataaatcaccaggtcctgctagccacgggcatctcctcttggtcctcatgttacattttcttagacttaagttttcttcatagcaagggaacatgacttgactctgaaaacttgaatgatgtattttaaggtgagtaagttacataggaataatgtatatccctatcatcattgttactattgccatcatcaccatcaataagcatcataatcatatcatcccaccagcaccatcatcaccatcactatcatcatcatcactatcatcatcatcactatcatcatcaatcacatcaccactaccaccatcaccatcaccaccatcatcatatcaccatcaccatcattaccatcaccactgtcaccatcacatcacaaccaccatcaccatcaccatcatatcaccaccatcaccatcatcactatcaccaacaccatcatcaccctcaccatcatcactatcatcccaccactaccatcaccaccatcactatcatcatcaccattatcaccatcgcatcaccaccattaccaatatcactatcaccatcacattaccaccaccatcaccatcatcaccatatcaccaccatcaccatcatcactatcaccaacaccatcatcactatggtcccatcactaccatcatcatcatcactatcatcatcgttattaccatcacatcaccaccatcaccatcatcactatcaccaacaccatcatcaccctcaccatcatcactatcatcccaccactaccatcatcagcatcactatcattaccaccatcgccatcatcagcatcactatcatcatcatcatcacatcatcaccatcaccatcaatcatcattgccaccatcgccatcaacagcatcactatcatcatcatcatcatcattgtcatcagcatctccatctgactggtggccctggaactcctcctttgtcctttcagttgggcatctcccatcattcccccagccatctccactcccgattctctgtgccgtcttcctctacatgttcagccctctctgctacactggtgggtgactccaactccgacactacatgctctgccctgtcttccttcctttcacagctcttcatgctcatctcacctcctgaactgctgcctgagcatccacaggcctgaagccaggactcactctttcggactgaccctcagctgatccttgagctgaagttccttgaggaactcggcccaacattatatttttccatggcaccagcctcacagctgatcccacatggtcctcaaagaatgcaacctgaggccgggcgcaggggctcatgcctgtaatccccagcactttgggaggccgaggtgggtggatcacctgaggtcaggggttcaagaccagcctggccaacatggtgaaatcctgtctctactaaaaattacaaaaaatgagccaggcgtggtggcgggcacctataatcccagctactggggaggctgaggcaggagaattgcttgaacccaggaggcagaggttgtagtgaaccaagatcgcaccattttactccaacctgggcaacacagcaagattccatctcaaaaaaaaaaatgcaacctgatagaaatgtggtgctcagttcttatttgttgcaatgtagctattacctttggttcctgaaggagttgaaaggggcagggaatgatgcaggcacacattaattcactgctagtgacccccattttattaggaaagaaataaaatacatgtagggtaatgggcacattgtgatttatataacaagcgtgttcctgaaaaggtacatcaaagtcagaatgcttttgaagtggcctcagaaaggttactgtttaaaacactgttattagaattactttaaaaagagtgaaaatattcagggaatgcagccttttgtagattattcatgttctaaagtgatcatgcttatatttttaccttctgttagaatcaatgaaaaacttaattcataattctactaagctacaatttgaaaatatcttgggtgcaattttccttcacatttctttggctcagtgtcctccagatttaccagtgacaacaaagtcacagcaacctcaatgccttttactgactcccatctgcagagcctcaagccaactccctctggaaactcctcctgctgttcttagaagtctttcgggcatccagacagtcctctggttctctctgagcttccccaagatgcaggagccacccagcttgcatcccacagcctcccggcttccctcagctgcacaccctcccaggtgccaggagcacagctcgggccccgctctcccccgtcacgctgagctctgtgctagggtgggtagggaaggcctccttctctgcagaagactcaggccaggccaggttcccacaccattctgtcccccacacgactcttccatgccagtctccatctcctcaagtacctgcctaccaagaaaataagtcctgttccttcctctgtgcacacctctttatgcaaagaggcactgaaagctcagaggcctcagcagccccgtctgggttctggctgcactcagggatgcttgcccctcccgctggaagtgctctccccacggcaggagtgaggagcactgagacaacagccacctggagtggaaggtcacccaggggcacgccatggcggtggagccaccccggggatttcttcttcctttgccagtctctgcccaaaagatgaaatgcagagatgtggtgtgtacatctgagaagccacagatgctagcagtgcccatggggggcatctgcagggggcatctgttgggggtctggagggcactatgttgtccccaagggccccatccagcacagagcagtgtcagccagctctcagcagtgtcactttgtggaccagcccagctctggaccagcttgctgaggggagacggcacagtgcagagagaggaaactgcctgatctccgttccagatgtaacccagttcttaggctattatgggactgtggggacattaaaggacaggaagcacagccctcccctcaaacatcagaacttcccaagactcccaaggagctgctggccccagcctgggtccctcccaagtctgtctgccagcagctgcaaaggcctcacataccctccctgtgtcaggtgcaccaaggttcctggctgattagcaccaaggaggacaaaagcaggccttttgcagtagctgtgtctgtctgtctgtctgtctcaggaagctggaaaagtggctaactgaattacatccatgtcgtgctcccccggcgagcgcccgccaccttcatcttttccccttttggtgacgttcagcactgattacaaagtgtctcagctggtaatatgttcacttcattttttttagatgtgttttttattcagttcacagatgaatccaattagcatatcactgtgactgattaaatatgcctcatgtaaatttacatgtcaaaatacacactgtacttaaacaagtaggcccggctgccaggcatctgtaaacagctttgcaggcttggccagctcgaaacacaaaagctaagatttaaatgtgcggtgactacctggtagagagcgaggaagagggaaaaggtagtgttactcatgcatgaggggagggaatgaatatagacatttgtctctctttgtctctgaagggaggccattgacaagagagtccccatctgcataggaggctgccacatccaattagctcaccaggcgatggaaattgcgcctctgatccagaaaagtccctgtgcactaaagtcaagactgtttcaaagagattatattatcttagacagcaggattaaattaatatggcaatgacttctacgggaggaaatgtttttgtgaaacgtgctaatgtttattatgcattctccatcataagtgatcgcctttgatgttctattcatttgttgattggtttccgacttcctcttagaagggagtgaagaaacccaggtatgaaaattggattgcgaaagttaaagacagagagaaagccttaattagattcctctagaagcagtgactactggttctgtgggttattgggggaagttcttaaaataatgaaataaaattaagtgtggtttggccaccaagagcatcagcaccaaaggcacccagcctcctggggaagccctgagtctccgccgcatggatggtagaggggtgcggccgctgctttgcctcgtgggggccgtggaggggcgcccttcggacctcctggagagggtagaggggtgcggccactaatttgcctcgtgggggccatggaggggtgcccttcggacctcctggagagggtagaggggggcggccactgctttgtctcgtgggggccgtggaggggtgccctttggacctcctggagagggtagaggggtgcagccactgctttgcctcgagggggctgtggaggggtgccctttggatcttttggagacacctggccacagttcccagccactcggggtccaccacgttccctcgaggccaggctccacccaggctgtccccagcctaggacaaagctccctgggctacagggacagccctccctggccagtgccgcccttctgcgaactgcacctcgggggctcctgctggggtctgaggctctgccgccttctccctgcccaggctggcccccatcgatcccaccctggcgtctgcttcccaagcacccagtgggcacaacccccagaagcacagtctctctcagtcctgggaggggattttttttcaatttcaagtcatgtcaataaaagtgattttcataaactaacctagaggaatttttatggctggggagacacaggcttacctgggaatttctgagtgtgccttcatggttgggccatctgcagctgggaactaaaaggcgctttaaaaatgactgacactgtaggaaaatctcacaactggagcagatgagccatagtgactgagggagaaacatgagctggatgagaaaggagggcctgcaggcaccactggaagggcccagcatcctctcacagcacagcgaactccgatgtggctctgactgtttaattaacgtgtagctaaagatcacagaaaaggggaaaacagcgaagacagaaaagaaaagaattcagaaccagctttagcttctgatattatgggaaattctgaagaggaacgaatggtatgacaaaatggaaagaaacattttcctggtgtgttttataaacacacgtaaagaggttcaataggtttaatgtggtaaaaggagatgtatttaaacatggcaggcatttgcccgaagctgcttgtaaataagctgtgggacagccgctgcggaagatgcagagaccccagagatgcagagaccccagagatgcagagaccctagagatgcagagactccagagacgcagagaccccagaaatgcagagactccagagacgcagagactccagagaggcagagaccccagagatgcagagaccccagagacgcagagactccagagacgcagagaccccagagatgcagagaccccagagatgcagagaccccagagatgcagagactccagagacgcagagactccagagatgcagagaccccagagatgcagagaccctagagacgcagagaccccagagatgcagagaccctagagacgcagagactccagagatgcagagaccccagagatgcagagatcctagagatggagagaccccagtgatgcagagactccagagacggagagaccccagagatgcagagaccctagagagcatgggggccctagagagaagtcactgacacacaggtttcggctaaaagttactattctgattagggcctgtgtgaagtaggaatgtgcctgtggagtgtgatgtgaacacagctctccgaaattttcccatgcgtgggccgattcgactgtgtgcttgtcctgagaccaagaagaaaactgctgaagtcccaaagtgggacagggttggggacaggacactcctcaggaaagaaaggccacaccctttctgcagacactcaaaaagactgctgtgtgggatgggggacagagcaagagaggaagacacgaaggaaaaacacacatttaccggctgtttttgtctgtgagtcgagtctatgaaacatgccgtgagattattttctgcggttgattattcatgcaacgaacacgtcagaacaccttcaggtggcccatgggtgaggtctcgcaggtgcagcctcctctccagaatctggcaaccaggagaggccctttggcgggcccagtaatgggggtgcatgcacctctctgcccatcccacacctctacacggctgctcccaggcaccagagcctccacctaccccaaaccaagtcctgcccatagtgtgccccgtagcaccgtcagccctgccttccatgattgcagctgatgtgcctgggggcgcgggcaccattaattcctgtatcttcccctctgtccaatccatcaccaaatcccactgctggcacctccaagacacctgcagactgcagcccgcacgccagtgcccaaggtcaggccaggtggcccctgcctgctccccatccttcgtgctctgcccagccgtccccttcactgtggtcagagctgtgggcggtaagccacccaggtgccgaggcaagagactgagggcacgaactgttccagtgtaataaaatatgtaaaataagaatagttatactagatctagatcatagatatgattatatatgaatatcattcatcattagtttgtagcaattactctttattccaatattatcatagtctttgctctataatcataacctaggaaaaaccaggccatacagagatagtagctgaggggacacagtgagaagtgaccagaagacaagggtgtgagccttctgttatgcccagacagggccaccagagggctccttggtctagcggtaacgccagtgtctgggaagatgcccgttgccaagcggaccgtggtcaagcggtagcgtcagtgccaaggaaaaacacccgctacttagcagaccaggaaagggagtctccctttccctgggggagtttagagaagactccactcctccacctcttgtggagtcaggcccacccgcagttatccggaggcctaaccgtctccctgtgatgctgtgcttcagtggtcacgctcctagtccgccttcatgttccatcctgtacacctggctctgtgttttagatagcagtagcaaatttgtgaaagtactaaaagtctgatatgcagaaataatggcgtaagctgtctcctctctcctctgcctcggctgccaaacagggaagggccccctgtccagtggacacgtaacccatgtgaccttacctatcactggagatggctcacactccttaccctgcccctttgttttgtatccaataaatatcagcgcagcctggcattccgggctactactggtctccgtgacttggtggtagttgtccccagggcccagctcttttatctttttgtcttgtgtctttatttctatgatctctcgtctccacacacggggagaaaaacccactgaccctgtggggctggaccctacacagagcgacacttctaacggggccctgttccagaccccactgcctgtgggtggagtccgggccgaggccccttcctctctgtctggttcttgctgcttttttcagtctggaatcttcggaggctcttgctctgctctaatgcagaccttctcccacacactccctccacctggaagctcctcctgccttcgtattggccttggtaactcccgcaggtcctgctaatctcgcctgaaaggtcacctctgccaaggagtgttaccctgccccagacaaggtcagatctccttaatggatgccctgagccatcacagcatggccaccaggcactccccggggcctcatccacacagaggccgggagcaggggggcacacctggcttgttctctgtccccatgggggcggcaggcactggatttggtgctcaaacagtgggtgctctctccgtcctcccatgagcccaggggaaagtgttgggaaaaacacatttgtaaaaatcacttttgtgtgcatttttcaacagaacaaaatacttccacatgtgcctgggtttaggatgggcaggagaagcccctgaaagggtgctcggtttgacgatgggatgttttcgtgtgcatcccgtcaccagccacagcagacccgttctccacaaagctcggtcagctgctggagcaggagtgtgctggactcctgctgctgcttctccagcgtccagtgaggcctatttcttatagctacattttgccaatgcttttgagtgattcttgttcagtgcctacaatcaacacagcaggacagtggctctccctggcagtgcctctcattgacccccttggagtccttacagaagctgcacattaagtcccacgcatcatcccaggtcaggggacggtgagtggccatccagcatggtggaagcaggtgcagctgtgccacccacatcgggacgcgtgctccactcgtggcattccaggctcacaatgtcgcccttatccgatgatcagccacctcggatgtgtccatcaagcttttaaaattcacaaacaaaaacaaaagatgcactagacccacccagcgaccccaaggtcacgccctctgtggttattggcaactcggggacgctgcccagctcccgattccgctcagcacctgtggacgcgggagcatctatcatcaatcctctgcaattctattttatgataaatacagaaatgacccttaacccacctttccctcctttttgctttttcctattgacacctgcccagcacatctgcctctcggcaaccacagaatgaaccagaaactttgctcttctgctgtgcccacaggaaactgaatctcctgacagcctcccatgactgttctgctagaatcgtcaaacttggggaaaaacaggatttgagatgaacttccacgttacaggcagcaaagcccaatgatgatggtctctttttcaggacaagcatttggattccataacacagtcagtcacagaccgagcaggtacacccgaggaatagcctctgcagtctcacctgctggccccacaacagagttctggattctttcctagtctgtgtttgggaaacacacgtaacgctgtggcactgtggcctggagtgggtgaggcagacggccagctgccctcccctcctgagcaaagggaagtgggtgcatggaggaccccagagagcccaggccccacttcctcatgaggaaaaggaccacagcaaagtctccaagaacccagcctcagcatccccgccactccccaaagctcctcagcgtggctgcttgggacccctcatctgcccccatctgccatgttcatgtgcacaaggtccacaacggcagccagaccacacctggaaagacacacagcaaaagcttcccaaggaacacgggccgtgaaggagttaaagtcctcaggtctacgaatacgacattatctttttttccttgtttcctgctaatctgtttaatgggaaagtttccctcctcacaacccatatacagaatgcttccttagttgcaggctttacaaataattatctagaaataaataagtacaatgatctattgtaagtaaatctgcataaagaagagttttcttttcttccatgaaaatctagccacttactgcagtagaatcactacactccatctgcgcacggtgacgcatcactgcagccacactccatctgcccacggtgagacatcactgtagccacactccatctgcccacggtgagacatcactgcagccacactccatctgcccacggtgacacatcactgcagccacgccccatctgcccacggtgagacatcactgcagccacactccatctgcccacggtgagacatcactacagccacgctccatctgcccacggtgacacatcactgcagccacactccatctgcccacggtgagacatcactgcagccacactccatctgcccacggtgagacatcactgcagccacactccatctgcacacagtgacgcatcactgcagccacactccatctgcacacggtgagacatcactgcagccacactccatctgcacacggtgagacatcactgcagccacactccatctgcccacggtgagacatcactgcagccacactccatctgcccacggtgacacatcactgcagccacgctccatctgcccacggtgagacatcactgcagccacactccatctgcccacggtgacacatcactgcagccacgctccatctgcccacggtgagacatcactacagccacactccatctgcccacggtgagacatcactgcagccacactccatctgcacacagtgacgcatcactgcagccacactccatctgcacacggtgagacatcactgcagccacactccatctgcccacagtgagacaccactgcagccacactccatctgcccacagtgagacatcactgcagccacactccatctgcacacggtgacacatcactgcagccacactccatctgcccacagtgagacatcactgcagccacactccatctgcccacagtgagacaccactgcagccacactccatctgcccacggtgacacatcactgcagccacactccatctgcccacagtgagacaccactgcagccacactccatctgcccacggtgagacatcactgcagccacactccatctgcacacggtgacacatcactgcagccacactccatctgcccacagtgagacatcactgcagccacactccatctgcccacagtgagacaccactgcagccacactccatctgcacacagtgacacatcactgcagccacactccatctgcacacagtgacgcatcactgcagccacactccatctgcacacggtgacgcatcactgcagccacactccatctgcccacggtgacacatcactgcagccacactccatctgcccacggtgagacatcactgcagccacactccatctgcacacagtgacacatcactgcagccacactccatctgcacacagtgacacatcactgcagccacactccatctgcagtgacacatcactgcagccacactccatctgcccacggtgacacatcactgcagccacactccatctgcacacggtgacacatcactgcagccacactccatctgcccacggtgacgcatcactgcagccacactccatctgcacacggtgacgcatcactgcagccacactccatctgcccacggtgacgcatcactgcagccacactccatctgcccacggtgacgcatcactgcagccacactccatctgcccacggtgagacatcactgcagccacactccatctgcacacggtgagacatcactgcagccacactccatctgcccacggtgagacatcactgcagccacactccatctgcacacggtgagacatcactgcagccacactccatctgcacacggtgacacatcactgcagccacactccatctgcacacggtgagacatcactgcagccacactccatctgcacacggtgacacatcactgcagccacactccatctgcacacggtgacacatcactgcagccacactccatctgcccacggtgacacatcactgcagccacactccatctgcacacggtgacacatcactgcagccacactccatctgcacatggtgacacatcactgcagccacactccatctgcacacggtgacacatcactgcagccacactccatctgcacacggtgacacatcactgcagccacactccatctgcacacagtgacacatcactgcagccacgctccatctgcacacggtgacacatcagtgcagggtagaaactcccccatctcccatgcagcccccagcggccgccatcacaggtctcactgtctcgccgtgtgtgtgtaacctgctttctccccagctcccacggctgtggcggcacctctccgtctctgtctgcgcatggccgctctctgtgtctgtaccttcacgaggtgatcccctcttctgctaaggacacagtcatgttggattgggacccaccctcatggagtctgacctcctcttattgacatctgcaaagatcctatttccaaataaggccaaatccacaggtagcaggggttaggttttgaccataactttctggaggtctcattatccccacagcaggtgtcacccagaaatggttgacagagtgtccactgcacaccaggcagcctgctagagacattgcattcattacctttgcctatttatgaatatgggaaggttttgcaaagcgatgaatggcatggaaagagaccatgtaggccttgctaagaaggatggcctggagggatgaagaaggacctttcaaggctttttgtttgaatcgaaagtttcctttattaagttattttaccaagtgagcttgtatcaaggctgagctttcagcgcagtatttatgagctgcatttctttcaaaacattctatcaaactgacatttccttaaatcagactgaccttccacaatatggaataaatcaggtggtttaactctactgactaaagagtgttttccccaaccctgagccaggcggctttgtccgtgtcgctcagctgccggctcactgaagggtggtcatggaagagcaggccgccgtcgggcggtgactgattacaatcatttgttgtgatgcatcgcaaattaaagggacaagcccagccaagctgctccgctcagagagtgcgcgtcccgcctctgcaattactgatgtgcacaaaggacccagggaccacttaaaacaaggggaggactgagtccacgcagggatgaagccacaggcacagtccccacgtgcttgacagtggccccgcaacccacctgctccagacacctgttccgagggaatctctcccatccacctgccgctgtggctcagaccccaggcacaacacaagcgctcggcagagaaatggaccgtgccgccaatgcactcggcgctgaaccatcattgaggagagaccagctgctgctgtggcccctggggctgcagcataaacagtcgtggtggcaaagtggtgtccacaattacttgtgtcgtccgtgagcacactggctgtggacggaggaaggctgtggctccaggattgtcatttcagcaccgctgcccatggtccaagagccgtagctgagatgcaatgggggtgtccttcatcaccggtccccaggaccacacctgaaggacctaacaatgatcctgatgagaaggttgttaacctgtcaaagcatcaagatgaaacatcacacaagacgctctgagcaggaacccactagtgacagggcccttcgatccatgtggaagtgcctaatgccacttttttgatgagcaaaaatggcagctaataatttaaggcaaaaaaggaacacaatccagtatgacagtttttccccaaccagagggagtgcccatgcgtggtgtcccacgaaggcggagctgggcatgagcacggccatggtcctgctgtcagagcaacctcattccacggggtgagcatctcgcaccttggtgcggaagcccagagcccacgctgacttctgcaatagcctcagtaaagcgacgggcgacggccatggcacagagcactgagcacagaggttatctgaggtggcttcgcatcagctcacagcagaggagcgttggcccagttcacagatggagaaaacaaggctggaggagaccaacgtgtccaacatcacaggtaagtcaaggctatgggactgaaactcagtcctgtggacaccagccagggctgcaggtgctggctgtattcctgctgttacagtcagtgcacatgtgtgtggggctctgcagtttcccaggtactgtcagtggcagtgaaaggtgatggcgtgctggcagcccttgcagccctcgctcactctcagcacctccttggccttggcgcccactctggccctgcttgaggagcccttcagctcactgctgcaccatgggagcccctctctgggctggccaaggcctgagccggctccctctgcttgtggggaggtgtggagggagaggcacaggcaggaactggggctgtgcgtggtgctcacgggccagcacgagttctgggtgggcgtgggctcggcaggccccacactcggagctgccagccagcgctgctggccccaggcagtgaggggcttagcacccaggccagcagctgcggagggtgtgccggttcccccagcagtgccagcccaccagcactgcgctcaaattcttgctgggcctcagctgcctccccatggggcagggcgcgggatctgcagcccaccatgcctgagcctccccttcgccatgggctcctgtgcggcctgagcctccccgacaagcgccgccccctgctccgcggcgcccagtcccattgaccgcccaaaggctgaggagtgtgggctcacggtgcacgactggcaggcagctccgcctgcggccctggtgcaggatccactaggtgaagccagttgggctcctgagtctagtgaggacttggagaacatttatctctagctaaggggttgtaaatactccaatcagcactctgtgtctagctaaggtttgtaaatacaccaatcagcactctgtgtctagctcaaggtttgtaaatacaacatttagtgctctgtatttagctaatctgatggggacttggagaacatttatgtctagctaagggactgtaaatacaccaatcagcactcttgtgtctagctaatggtttgtaaacacaccaatcagcactctgtgtctagctcaaggtttataaatacaccaatcagcactcagtgtctagctcagggattgtaaatgcaccaatcagcaccctgtcaaaaaagaccaatcagctctctgtaaaacagaccaatcagctctctgtaaaatagaccaatcagcaggatgtgggtggggccagataaggggaaaaaagcaggctgcccgagccagcagtggcaacccacttgggtcccctttcacattgtggaagctttgttcttctgctctttgcagtaaatcttgctgctgctcactctttgggtctgcactgcctttatgagctgtaacactcaccatgaaggtctgcagcttcactcctgaggccagcgagaccacgaacccaccagaaagaagaaaatctgaatacatccaaacattagaaggaacaaactcgggacacaccgcctttaagaactgtaacactcactgcaagggtccgtggctttattcttgaagtcagtgagaccaagaacccacccattctggacacagcaggtcagggaatggggtgccctacagagtttccagaaggcaaccacgacaaaacctaataccaattagctaatgaccattctacacacttacacacatatgtatgtgctcagaaagtgagacacactcagtgagagacacacactacatacaatcactcacacacacagtgagacacgggctcatacagcaagacaacacacatgctcagtgagataccacaattccaccagcagggaccatctcagcagaatgtggccatgcaggggcctgtgcctgctgctagaggcgacgaggtctcagcctctaagtacaaaccttcccacatacgaggacagagaaacctggggtgaattccacatagttcatctaacaaacaggcatcccgagcaagttggggtttaaccgcattgactctggcaacctgaacatgtgctgggtgtccaagtccagggctcagaagcagctggagagcccgggacatgcacagcattctcctggggacgtctctcaggacctgttacccagacgaccaagacgagatgcccaggacagccacagcccccgggagagcatgggaggtgcatgagggagctgtggggccagagactggggtcacagccatgggggagccgggggagcctggggagcccagcgctgtgaggttgcttggacacactggtcacgccggacactgccccatggtttcctgtccagctgtttcctggaatctggctgctaaaaagagagccatctacacactgtgtctgagggacgccaaggactccttcctccccagatgctcctttttcttctcctcagggcctctgtcatctcccactcaccaaagccccccctgtgccagtgatttccagaagctgactggtgggggggacattttctacttgcaggggagggaagagaaagggtcaccctccccgcaacagaactgactcctggctcaaccccattctcctccaagtcacagcgtggctctgtgatgactgctgggctgtcgggtgtccctggggaaaggagtgccagggcctcctggggatggggcacagagtggccaattttatggatgatggatgcttcacctgcttccaaaggggctgcaggcagcgcaggcataaacactcagcttaataaagaccaaggctgagaaacaagtaatccaggggaagaaaggcagaaagatggtgctgcgcatctggtaattgactgtaatctggcatacttctgggtgagagaagctaagcaggtgagcacaaaatctgggagtgagattgccgactcgggacgagagaaacgcctgacatggcagtggctctgactgtctggtggcaggaaccatgcagttcaccaggaacaccaacgtctctcctggtcatgggccccaagatgcactcaggcgtgtcctggctgagagacttggcggagcctcctcagcagcttcaggtgagttttctcaatgagtttcttacctcgcacccttcatgaaaaccaaggacataagatcatgggggagtcctgtaaggtctaccgaagacttactccaaaatgcaacgtgcagaatcctgcagtgagcaggggcatggtttgcggaatatgggcctccagaagcagctgtgttcacatggtcatctgaccaagtcagagccaagtctcaggtcagtgctgaaagggccctgggctaacgggctgcggccagaaagacagtggctggcggggcagatggagccatcagacccggggggagggcaggggctgccaccaccacacggcccccacgggtcagaccaaggttttgtatttcacaaccagcggataatgagttgagttgttcactaaactgacgctcagaactcttattcattttcagaacagtaaagtcaaaactccacgaggaccttaaaaaaaaccatattctggatttaattacagataaaagaaatctgacttctattaaaagaggagaaattgcgtatttaaaatggaaattaccccagagcatgggaatggcactgtctttctgtcttattttagaataagaaattatgtggccattcaattcttgaagaaaatgtttttaaaagggaagaggtggatgggcaggaatgcatgcaaagagtttcgttcagggaaagatcctgccctggctctctaacctcacacagggacgggctttctttccatgcctcagtttacctatgtgtcccacgtccctctgacatgacgttgtatgtttccatttatttcctctgaaaatcacataatatgctgctttgtttctctagcaaggaatggctgtgagcttgggggtcttgaggctcggaggcatcacaaaaaataagactccgtcagcaagatggtgtgccccctctgcctccctctccgttcccaaccaccagcctgggatggcaccttccatgaggtggatgagtcccctccattcaaggccttctctgcaaacagccacccttctggctccaggatgaaatgaggctctaaatatgggctgccaggctcagggccagggccgacaggcacactgacctgcagcatggctaccccaggctctctctggcagttttgccacagaatgtgctctaagctgtgctgcttcctttccttcaaccacctcccaactcctcagtatggaagggctctgagtgctcaaaggaacacagccttttcagctggtgtcacaagacatttacaaaacaccgtggagaaattccaaaaccaggcactgtagagagacagaaagtagttttccctacaggagaacgttaacgctaagatcggctttagaaaacacacacctgacacctgagttgtggtgactctcacctggtgaagtcccttacgaatacatccttacccagattgtatactttatgggaaaattaataatgccaagcagacggcaaggctggcaggtgactctggacctcaggatgtgacacaaaggactggtcctcgtgacttgagcacatccctgggacatatggggtggctgagggctctgcagagagaaacacttcctcagtggggccctaggcctgtcaagcgggaaataaagacgaaatcttaagcagattttcaatcatcttccttcaatatcagcaaatcccacaaaaattacagtagggagtagttataggttgaaaggttagagctggggagaaaagcaggctatattttcctgttttcatgaaatttctcttcttacacctggcacctaagcagcctgctgctgtagttactgttcaggttactatggccacaggagggctgaggcatgttagatgggtggagggcaagggaagggttgagatgcaattcttatttccacgtatgtgataatgctgttgcaatgcttttcagcgaagcctcctcctgcacccagggtgtctcctgatgcagaggggccgtttccaatgccttgcagtcgtctaccttccctgccgctgctccggccagcaggcatttgctgagtgtctactgtggaggagctcccagctggcagggggcaggggtttgtcttcaggagctcttggactgcagctgtgagtggtactcggctccagtgccattgaggtccctgggggctgctcccaatggcttgctggccttgcctccaggacatgttctgaacctctggggtggggcccaagagtctgcgtttttaacgacctccagctggtgctcaggggccccgtttgcagaactgctgttctacaatcttgagaaaaggtttctgtaacgggctggagagtgagtgtcggaggctttgtgggtcgggcagtccaccgtgaccacgcagctctgcctgtggcgaaagctgccagagacaaggcgtgaaggagtgagcgagtgacagagtgagtgagtgagcactgttcccaccaggcttccttcccagagcagcacaccgggtcaggccgggccgcgggcagcacaccgggtcgggtcaggctgggccgtgggcagcacactgggtcacgctgggccatgggcagcacactgggtcacgccgggccatgggcagcacaccagggcaggccgggtcatggtgtgcttagaatttggtgaggcggcagggtcggggcagacagggtggggtctgaggacagccgctgaggctcttcctgtggggtggcatggaccttgcagctgggagatggcaggaccgggtatggggaaaggagggaggaaggcaggcatgctgggctggaggagagctgagccagggtgggcaacaggacttggtgggggtccaggctgtgcagtcccaggggaagaacggcccatgccagcggccctgactgagcagagcaggccagagcgtggggacttcatccctcagtgtccctgtcactccttcaacatgaaggagaaagccatgaaacgacgcaggtggctgtctgatcaggcccactgggtgctgagcttgctgtccccgtggggtgcccgtgctcatggcagccgagggtacggtgcagtgcacaggaggcccaggccacagctcccacgccaggaccattagggacccagtgcagtggctggactgcagctggggcaggagctgctgaggaggtgggtgcccagcaccacctttgcactcggcaccacctttgcactcagcagaacggaggccgcgtcctcagggaagcatgggcctgcattggtacggcttcactttaaaaatgcatcatcaaaccccgcaaaccactggaaccgggtgcctattgaatgtgagcactcagcccaaatcatcactgtgaactaaggtatctacacctgcttcattctaaacagaaatgcagatctctctaagcaggaagcaccttaagctcctgccaccagcattcattgggggatgtcattttggtcggtcaagggctgtgaagctgatgggattttcaatttgtaccattttataccacatgaggaaattgtgtaattacttttgcccatgacttctcattcttaacttgctttctcatggattacaactgtaataagacaaggtgttgatagagtgcaaactgtctttaaatttaaaaggtctaattgtacatccacctttaatcagtgctaaaatatcaacacagattgaaacttcccttcccaagctgcctgccagaggatgtgataaccctgctgccgacaccatcttcacgtgctctctgtaagccgtgggctttgcatcatacgaatcatcgcatctcgttagtgaagcggcctcatcttgacactgaagacagtccagggaggagtgagcagcactgcaagaagatgtcttagtgcctgacacggtgggtcttatcagctcaagatcctctcccattctttttaaacaaaatttttagagatagggtcacgctctatcacccaagctcaggggcagtggcatggttgtgaccatggttgtgacagatcactgcagcctggaactcctgggctcaagagatcctcccacctcaacctcctgtgtgggacttacaggtacatcaccacgcttggctaaatttttaaatatttttgtggagatggggtctcactatgttgcccagcctggtctcaaactcctggtaagtgatgctcctgccttggcctcccaaagtgctgggatgacaggcatggccaccacacccccaccttctccattctttaccccccaaagtgctgagatgacaggctcggccgccacgccccacctcctccattcttaacccccaaagtgctgggatgacaggcatggccaccacgccccacctcctccattctttacccacaattgttgctattcttctaaccccatgacatcttactgtctgcttgtagccaagtaaagaacactactgaaaagagagtacttcatgaggatttgccatggcatctttcccactccaggcattcgtgggatgcccaggcacgcaaggccaatggacatcttgagtgagcaatggcaaccaacaacttataaactgctcagactttacattttgctctcacatcaaattattcccacttcatttgatctgaatgcagcctcgcggagtgtaactattggccctagctgacagagaaggcaccctgaggtttgaaaacagtcaatgagtcgtccaaagtcacaaaacaagcaaatagctgggagggtgctgtgaactcaagttctaaactccaagctcttgtttttccttcttccattttgccaacctcaggtgccatgaagtggcacagaacatccaggcagggctggagaggctgatacctgacctagattggtgcctaatccatggggcactgcactatggccaacacagcagacatccaaaagcagggactgacctagagtaaggaggctccattgccctcagcttcagtaggtaagcagccaactgctgtagaggtgctcatggtgatggaggtgctcatggtggaggtgctcgtggtggtggaggtgctcctggtggtggaggtgctcgtggtgtggaggtgcccgtggtggtggaggtgcccctggtggtggaggtgcccgtggtggtggaggtgctcgtggtggtggacgtgctcgtggtggtggtgctcgtggtggtggaggtgcccgtggtggtggaggtgcccgtggtggtggaggtgctcctggtggtggaggtgcccgtggtggtggaggtgctcctggtggtggaggtgctcctggtggtggaggtgcccatggtggtggtggaggtgcccgtggtggtggaggtgcctgtggtggaggtgctcctggtggtggaggtgcccctggtggtggaggtgcccatggtggtggaggtgctcctggtggtggaggtgcccgtggtggcggaggtgcccctggtggcggaggtgcctgtggtgtggaggtgcccgtggtggtggaggtgcccgtggtggtggaggtgctcatggtggaggtgcccgtggtggtggaggtgcccgtggtggtgaaggtgcccgtggtggtggaggtgcccatggtggtatggaggtgcccgtggtggtggtggtgcccatggtggtggaggtgcccatggtagtggaggtgcccatggtgctggaggtgctcctggtggtggaggtgcccgtggtggtggaggtgctcacggtggaggtgcccgtggtggtggaggtgctcatggtggtggaggtgctcgtggtggaggtgctcttagtatggaggtgctcatggtggtggaggtgctcgtggtggtggaggtgcccgtggtggtggaggtgctcgtggtggtggaggtgcccgtggtggtggaggtgctcgtggtggtggaggtgctcgtggtggaggtgctcttagtatggaggtgctcatggtggtggaggtgctcgtggtggtggaggtgcccgtggtggtggaggtgctcgtagtatggaggtgcccgtggtggtggaggtgcccgtggtggtggaggtgctcgtggtggaggtgcccatggtagtggaggtgcccatggtggtggaggtgctcgtggtggtggaggtgctcatggtggtggaggtgctcgtggtggaggtgctcgtggtggagttgctcctggtggtggaggtgctcgtggtggtggaggtgctcgtggttgaggtgctcgtggtggtggaggttctcatggtgcaggtgctcctggtggagatgctcgtggtggtggagatgctcgtgatgatggaggtgctcctggtggtggaggtgctcctggtggaggtgctcctggtggaggtgctcctggtggaggtgctcgtggtggaggtgctcgtggtggtggagatgctcgtggtgatggaggtgctcgtggtggtggaggtgctcctggtggaggtgcttgtggtggaggtgctcctggtggtggaggtgctcgtggtggtggaggtgctcatggtggaggtgctcgtggtgatggaggtgcttgtggtggtggaggtgctcctggtggaggtgctcgtcgtatggaggtgcccgtggtggaggtgctcgtggtggtggaggtgctcgtcatatggaggtgctcatggtggaggtgctcctggtggaggtgcttgtggtggaggtgctcctggtggtggaggtgctcctggtggaggtgctcgtcgtatggaggtgcccgtggtggaggtgctcgtggtggtggaggtgctcgtcgtatggaggtgctcatggtggaggtgctcgtggtggtggaggttcccgtggtggtggaggtgctcgtggtggtggaggtgctcgtagtatggaggtgctcatggtggtggaggtgctcatgtaggatctaaatgccattcagttgaaccttttggttctgctgaccagcgtgcatttaacccactcatcctcacccaaggactcttgtccaataatgcaaatacgtagaatgctgtcctggccgataagtccgaggcctgatggtgtgcagtgccctccttattaagaacgattacagggccaggggactcagatgccagccttgccgtgtgaatcatcatgtaaattttcaagaatgggccttcagagctttggcattcccgtgctgggaggaaaagtgcaaagaatcagatgcaaggcctgagagcccaggggccttgggcaggtgttgaccaggtaagacctgcctgtgacaagcgtccccagcagacaagcttctgagcaattgtttcccaagtgctgaatagcctcatgctggtcccaagtgctcagggacccctccctacccatcccaggcagctctcggacttcactgaacctcccctgccttccaaccaagagctgcttctccggagtcctggtgtcaggaggaactttcctgggctcaccaaggtgactctgtgttagtctgatcaactgtgcactcacaggggacaccaactgccaaggggtttgtgccacacactccagctgctgtgtagccctgtagggtccccaaagcacaaggagacaacaagggagagtttcagatgccaacgggctggcggaacataattttttaaataattgagcccttcagagtctctcaaaagtcataatatttggacaattcatgtctcaagacctgagcttgtcccaaggggcccataggtatggcagagcaggagaaaccctctgccctgcccaagatggcccaggcttgtgacctggtgcagctacagggcaggactcctgggccgaccaccagggacagagggcagtggctcggctgtagctgaggcaggatctgctggggaggtaggtgcccagcaccatctttgcactctccatcacctttgcactcagcaccacctttgcactcagcaccatctttgcactcagaaccatctcggctcctctgcccctactgcttctgtcgagttgccatgggaactgatattggtagaagaactcccaagaagtggcttctggcagacatcggcctcccctcagctcagagacagcctgtgagccgcggctgcaggaggaaggagcatggtgggcacctgtgtgctggctggaagttgtgtctccaggtgcccgggggagggtgtgggcccatgcgttggcttcagggccgcactggcctctccctgcaggctccaagtgcaccttcctcgggcaccccttgctttcctccttcaggtctcaaagctatgccctgcccagctgccctgcagaacacagccctgatttaaaatgagccactttctgctccggtataaagacactaccctttctatgcggagatgaagccgcttcctactaaggtatgaagacactgccctttctatgcggagatgaggccgcttcctactaaggtataaagacactaccctttctatgcggagatgaggccgcttcctactaaggtatgaagacactgccctttctattcagaggtgagggaaagagtggaaacagcattcgcttatggacaaagaggaaaagaaaaggctgtgaaaacaggcatggcagcctcgcatcatggaaggaccagggcttcaacacagcaaaacagagagccaagtggacagcaggctcctccagcaaaacctgaggcctcgtcccccaggcccacagcccagcggcatcttcaccagcagacgcggctcccctgggactcccctccagcacagctcatctccagtgggctaggacggctaccacaggaggacatacgtgtcctggccacagccgccagccatcctgccgtcctcccgtcagtctctaaccccacggggcctggggcagtgaagacagaaacccatgtgcagggaagagtaatacttgggaaactcagcgacgcccacagtgtgctccatgaccgtcacaccgtcagcaaaaccccctcctgcacatccagggtacagggccttctgctggatttcacctgccccggcagccgactgcaccagcatcacagcctcctgccgacgatccctctgctgggaggctgggcgttccgtggagagaacagctgagaccccctcggcagcttcccaggcaacagaaggcgcagggaggtggtggtgattcactgtgtttctaacaggtcctctggccacggaagcctcctgcacatgtgaaagcctgcagagaatcccacgcacttcaaaactctcactcatgtttttcagaagcgggttttacaacttttggcatgaaaaggtcttagtggcatttctatgggtgtttatctaggctgctcccaaaccccagccaactaggggtgagctcccgtggccacctgtgacagtcagcccctcgcagtagacgtgccgacgtggctcccgaggtggaggggaagctggaggccctgggggctcttctccctgatcagggtatgaattctaaatgaacgtgaaagtgaggatgaaatggaacctgctctccccagcagtgagttggaggggggccaggtgctccccagcagtgagtcggaggggacaaggcagcaccctctgccagcaggatcagcattgctcgttcatttgcaggtgagaacgagctgctcccatgagtggtatgtccagtgcataaaccccctctgtgtaaaaataaacacagaaaagtggctgctgagcaacgcagtttcctagcccttggtttagcagtatccccgagtgtcccccacatgcggctcctggcgttccacgctggtagccctgtcgatggcgatgcaattattttctaccacagcgttgtgttgtctgcgctcagggtaaagccatgatgaaggcggctttcgggacttgtaattacagagccatgggtggcctctgtcctcgcagccgggaaggtcagcacaggtcctgggtgctgccagccctgagctccactcctgcaaacacttgtcaaaatgccagaagtaattacctggctgttcagaatggagtcatggggtgcagctcctaccatctccgattccctaaagcctccatccaaaccgaaacttgtttacaacctcctggggctgcagccacagggcacctgctctttggcagcagaacctcgccatagtccttaccaatgttcctgtctgctggtctctccggcagcccaggggaggcgctcccgtgcaggtgggagttcttgttccatgtccagcccacgtggccctggacacaagctggggctggttcacacactgcaggccccctccccgcccccaacgcagcaggtccagcaggagacgggcactgagcctgcggggcccactgtgcagaccccaccagcaccaccggcccacgcttcccacgccgcgccctccacttcttcatctttttctcttagaggctcctctttttagttactcctcatcgtctgtgtctgtgccgtgagtcagggatgttctaagagcaggaggagagcgtggtgcttccctctgagcatctccctcgcccactctgggtgacacctcagccaggcgagctgtgggatcgtcaacctcatggctgcggagcagcaggatgagcacgagccccacgccagccacagctggagcccaggagcccccagcctgcgttgatcctggcagcagctcagctccatggaggacgtgacacagcggcccacgtgcagcggaacctggagccgggctgcccaggccacacctccagtctcactgctctggcgctgtttctcagctgcaccctggaggtctggcgaaggggagcgctgggatccctgtgcctggaagacccttgaggagagtgcaggtccttggagagtcactttcatcagtctgacaggtgtctcattcacctgcacatggaggcaattttctcagcaagtggctgttttgaacatttccaaagcatcctccttcatttctaataagagtgcaacttcccttccacactcatggctcaggagttcctcttgtcttgctccaatctcttaatcatgagggtggtaccggagcacggatgggcttcgggccccaccagtgcacagctccacccggcctggcctccctggggagtgggtgtgtgggagcgtggatggctttaggccccactgctggtgaccagcatgcagctccacctggcgtggcctccctggggagctggtgcatgggagtcagatgaggaacgtctgccgcttgtggaccaatgctgcagcagcaaggcacccctccccctcccccggggccaacctgcctgtgtccacctcagcggagctgattccatcagctgcagtgaaactcaggcccaagtccttcttagtggctgctgaagatgaagttcccacactatgaagtccgattctgaattccaccttgccagcctcttactggcatgtccttggcacactggaccccacatccaggctgcaccattctcattcctctcaccttcagcccctgagacccacgctagtccctgtgctctgcccaaaggccagcttctctgtggagcctcatctaagccctgccctgccctccccgatgtgccatccactgcccctaagaactcccgtctgaacagccctggcaccggggttggggggagcttctggagggcagggccactgacatccagagtgatatcaccttaggaaggtgtgatgcattgccgaagacagaatccgcacggagcggaccagactgtgaagcaccgatgcctgcctggggtcgatagttaaggctggctggattgtaagtatgtgttataaaggaattcacttcactttgccattacgcttttcaaaataagcacgtttgtctgctttatgagaggccagaagcctgggcagcccttgctccagcagagaggcctgtgactaacgcagaacgctgcgggctatggggtccaggcatcggcacagagtccagttctgagccgggattcaagagaggctcacaagagaggaggggagcctcttcctccatgtggacccgctacatatgagacgtgaaacacagacagcagcacagcagacacgaccctgttctgacactcaccagcttcacaaagatgccgaacaggcagaagcaggaggacgtcacggaaagtcaccgtacctctgaatacagaggcgccgctactgaaatgacacggggcgcctctccaacaggctgaaagaaacaatggcagctgaatgccgtgtcttagaggctgtcaggtggaggatgctgaggtcaaagggggaaactgctcaggacaggagccccccatgagcctcaccccaccattcagggtcagcacaggagccccctatgagccacacccccaccacacagggctgagtgccagagacacaccctccgtggcgcccgagagggaatgtttgaagaaacagcctgaactcggcctgaaggaaacggccgagcatgggaggggattcctggcaataagctcataaaccacaggcagccccacaggccaccgggtgagggtctctgcagactgggagccagcaaaagcaaacagtttctaaaggatgatgaatttccttttctttgaaaggagcaatacaaaaattgatcagaaatatactatttaagaagaaactaccaaggaaatgaagaataaaaaggatttttctcttctgccagttcaactatgtgactgagccacggagattaaacgtagctaccagtcatttctatgtactttgtggtagagtaagtgcctccttgagcaaaacccacttatttttaatattcactaataccctgtgctcatacccaaggtcataaattagcagaattcccgggaaagcattgcctacgataaagaggagacgctgagtaatggaaagcagctgcccttctcattcggcatcaataccacgtgacgtttgatggggactaatgtgggattaactacacgcctattcattaggttttgtatcattttgtataaaattagcaaaatgaatgccctttgaattctaccgccagggtgatctccccgcattaataacagcagcctcaggtcctcaggcccttgagggaaccagacgccagcagccattgggcttccaggcagctggcaggtggcaggtgcaggcagcacccagcactcccagtaatttcaacagcaggctcttgagttctgtatgttggtaacacaggcaccaccacacgtccttccataggtgtccgcccatcaccacagggcgtttgtgatgacactattaggattccacatcatcttttaaaacacaaaccataagaaactccttttgaatttgaaattcttccctgctatcatgtcagcctgtctacgtctcacctgaaactcagtaagaggctcctcttcaccgtgctaagcactctcccaaggccaatgggccagtcaccgtgctaagcgctctcccgaggctgatgggccagtcactgtgctaagcactctcccaaggccaatgggcgagtcaccagtcaccaaccgtgctaagcgctctcctgaggccgatgggccagtcaccacacatgggcatgtccactgcctacctgcaagatcttcacagtcacaaaattcttttttataatctcttgggttttttttgtttctttgtttgtttgtgagacagggtctccctctgtggcccaggctggagtccagtgatgcaatcttggctcactgcaacctctgcctcttgggtttaagtgattctcccacctcagcctcccgagtagctgaggtttgagccaccacacccagctaatttttttgtatttttagtagagatggggtttcaccatattggtcagtctggtcttgaactcccaacctcaagtgacccgcccaccttggcctcctaaaatgctgggtttacaggtgtgagccactgcacccggccaatctgtttcttatatagcatcaggcacgttcatgacaccatagaattattcaaaataattctttaaaaatcatgcatgaatgtaaacaattttgcacacgttcaagaagcaagaaacattctgactcacacagccacaggagttaacatggaggcactggtgcaagttagcaaattcaggtgtttagaaagttgtcaatatgagactcaaatgtacatttcctatgtggctcccccttggtgcagcacttcgataaataacatgaacacatttgaaatgactgagaaactagctttcaaataatcaacctcattttctctagagagccataaaataaatcaaaggtccttgtctgtgagtatattgttatgatttttaaaaatataacaagattgccattcctagcatccttgaggtcctgcaaacctaattccagtggcattgctccccagtactggagaaactgccaatcatgggataattatcaatgcatttctgcataatacctgatcacggatttggtcttaaatatctccaataatcacttctgacagggaactagagcaagcgaaacagatgccatggagggagggagctctggcagccacgaggcactgaagccgttgttgggaccccccattcctcttgcgtgggagtgtttggtatggatcccactgacttttcatgctgggaccgcactggaccgcccagctggagtgaggatgctgggctgcttttccgagttgtaccccagctccacaagcctcacagcaaagtatggcaacaaagtgagactggggactcaagtctccacaaaccttaaatcagactgcagaagtttagtacaactttgcaaagcactgtatttcaaccacaaattctcagccccctaaatcaccaccttgagcaaaggagttactgagggcacgaggatatcccataagcaaaacccgcagcagccaaaacagataggaccagcaattcgctccatcccttagaacatggtggctacttcacaccttgattactctcactggaaaaagaaacttcaagtttacagggtgccagtacagtgacgcctcaatcaacgagaactaagtattgaaatcccgaaataaaccagagtattttgctgcattttacactgggaaaaaaagacacaaatttaagcaaaaaaaaaaaaaaaaaaaaaaaaaaacaagttcatagatttagcaatataaaggactggctaaaaccaagtgtcatttcccgctgtggctgggtcagtgtgttccgtcctgtcttatcaatgatacggaacgggagcaccctgcctgcggaatggccctaatgcactgaaaaccatcaggctaaggttctgttatgcttcctgtatttttcttactaggcaggaagattaaacaatacactctacaagagttttcaacaagtttaaaaaaaaaaaaaaaggcaggttgaggaaaatgcaacattgtgtccaccatcccattctgttcttcaagactctggagagtaaagctttgtgtttttcactcaatgacaattattaatcatataacaaagattactcaagctctatctgtaagtacatctcaaaaatgtgtgattcgcaatgcccagaaccctgggctctaaacagtgaaaccgtctggaagtcggccggtttttactgaaacctcccagatactttgtggtgtctctgcccaccgcagtcgggagcagggccggtgtgtgctcctggtctggtacaaaatgaaaaacctcaaagcaaaattgcacgtgctctgcacacactgggattactacaaacaccaaatcttgcttttccaaaagccggatttgttctcggtcacttgcagccctgtgtctcctgccttctatctgagccagttccacacatcagggcagcccagtccctctccacacagtgaaatcccagatggtgcccacggacagccacattgccctgtgactgcccctcgtcccctcactgcacaccagatttccacggaaaccgagaccttcctctgggttgccccatgtgggtagtgtgagtctctctctgccctggctgtgcatgtgcgtgtttgcgtgcgtgtgtgtgtgcacacacgtgtgtgtgcgtgtacgtgtgtgtggaaacagcctcacctgtggccttctccacatcctcagtggtcacgttttggacattggcgctcactttgaaggtcactgctggtccgagaaccctggaagggataatttaaaataagttcataacgaagtctacgcgccacaccgcttttctgaaaacgacatggaaaacactggtgtgtttttaaaaacgcaaacatccaaggccgctgtggctccaggcgtcgactccactggacgtcggttttccttcacaccatgacctttgtttccatttgccaggaattccgtttttgggctttgcttttccaaaacacacatcacagtgtaatatgctatcctaaaaaattcacatcaacctctgaacccagcaacagcaagcagatattcttgctagagaaaaagaaaagttgttattgaaatagattttagtctttggtccccaagggagatgtatgaatctagagcagagaggaaagagactagtattttttaaactcttttgacaggaaccatttaaaaaactaccaaagtcattaagaactactctgtataaaaacaactggcagggaattgctagacaggaattatcaaaattgttcaaagctttttaaatgctatgtcaaccacaattttgaaaaaataccttactttttaaaccatttaattcatctgaagaccccatatgcagtagaaactgattattgtgcctacagccatctcaaaatgaattaggaatccagggtccattcccaaagacagacagactgaccccatgtccacagatgacagccatagatagctcttcctggaacagaccccttaaatgtcttctaagaagtaaatccctggaacagacaggaaatgcgaagaggacccaatttaggtgggagagggcagctaagactgttgcttcctggtccctgggaggtgcctgcactgacatctaagctgtgaaactgggtaccatgtagcccagggtcccttgctgtccccactgcagccacacaccctccaccacaggctcatcccaaggcagcatatgacacccaggctgtggattttgcacccaaaatcctttcaacctcacatgtatttttgattcagacatctctgctcatgatacctcagtcccaacctctggtcttcctccttgggatttttgctcattctcccagccagggccagctcctccatgtgcaagcccttggtgaaggggactgtcgtgccattacgaggcagcacaattaccatcctaacaccatggctgaatattccatgtggacgtcttagcatcactttgaactcaacaaggtctcccttgaatcagcgcctgctctgaggagcaaacagcattctaaccttacggatattccctttggcttccttatgccaggaatatccagctagtcaccaaattctgcggaaacccttggaaaatgcaccatgtccaccactgcctcttggttcccactgtgatcttctagtccaagcctgtgccctgtcacagcagagctgagtgacttcctgcgtccagctctactgcatgcaaaatgtccttggaagccgcctccagggatgaccatggagcaggagctggtgtcttctcgagcccaggccccaggcctgtctacggtgcctcggctgggccctctgctggtccccactatgggccctcagaaaggaggaggccactccctccctggactgcagctctcctgccaacgatgttccactcgctcatgagtgctgagttctaccccctctcaaagccctactcccgagtgagcactgtgagagtggctgattctccctgtctccacagtcttccagaagggccctgagtgcctgatatttagtgctcaaatggcacaccagacgttttatagatgttttccttcttcccgagcacaggatgggctctttgaagcatgcatgatgatttctgccacggcctcacccacgcaggaggtgatcaattcatatttgtgaccggttcaacattttggttgaatggttttctaaaattaagagaaagtcctcattaacacaagcagcactcatgtacccccgaaacaacgctgaggacagagagctcagccacagggcttcaagcttacacacggcatctgtgaaactgtaatctcgaccacatctgaagattccctgacagatgggactggaatatcctaaacctaatttttccctcacgtgctgaaagttttctctaaaggctgtgaggaggttcttggttcctcagagtccaaagacccagacccctatgctatgaagaagcatgtgacccatacatggccccgtatttcacgtgggggccgcaggagaggcccacacagcccgtgtcctttcttgcacgcatgccgagcgtcaccattgcgtggggctgtggtcatcaccagggagtgctcctgacaccctcggggtacatctcgcaggcggtgagcacccagtgaccatcgccgtcaggcccagcgagacccaggtgcctgcggtcacggtgcactgagccctggctctggcccttgtgctctcaggaaccctgtgggaggacggggcatgaggagctgtctccggaggagactcagagggtcggtaacgtgaccccaactgcataaccttccctaacttgaatatgtgcaggctctgacgtgggaagaagtctctatcccgaggccccactacaggtctaactccatgagtcactgttctgtggccctcctgggcccttccgctgggcctcagtttactcagctgtcgagtgtggcaaggcccacaggtcctcttggacttgctttggcctaggagaccctggttttcaataaactctggtggccaggcccagcgggtctgcagtaaacaggggcaacactgggggctccagagctgagctgctggctctgcccccagcaccatcagcagcagagatccctccccacaagaagaacttgccctggcatttgttaccaaccccacccaccaccccccaccccgcccgccacgtctgctgtgcaggtggcagatggctgagtgctgtgtggtccaggtgagaggcttctgggtagggagtgaggtcagccttcccaccaacttctttctaaccagggagccttggttgtctctgccatcttgttcagctttctgtctctttagacatttggggaaaattgaataaatcccatgtgcatattgccagcatcaaaaggggaatttctgtactaatcaggaaataaaaagtaaaacaaagatgcctagagccctgcagagtctcttaggagcaagtactgcacctaatattacagctctcggggagaaaacacccaggacgcccatccacacccacgacactcatccacatcctcgacgcccatccacacccacgacgcccatccacacccaccacgcccatccacacccacgacactcatccacacccacgatgcccatccacacagatgcccatacactccgacactcatccacacccacgatgcccatccacacggatgcccatacactcctacaatgcccatccacacccacgatgcccatccacatccttgatgcccatccacacccatgatgcccatccacatcctcgatgcccatccacacccaccacgcccatccacaccctcgacgcccatccacacccacgacgcccatccacacccacgacgcccatccacacggatgcccatacactccgacacccatccacacccacgacgcccatccacacccacgacacccatccacacccatgacgcccatccacacagatgcccatccacacccaccacacccatccacacccatgacgcccatccacacccaccacacccatccacaccctcgacgcccatccagatacccatccacacccacgacgcccatccacacccttgacgcccatccacacagatacccatccacacccacgacacccatccacacccatgacacccatccacacagatacccatccacacccacgacgcccatccacacccacgacgcccattcacacatgcccatccacacccatgacgcccatccacacccacgacgcccatccacacatgcccatccacacccacgacgcccatccacacccatgacgcccatccacacccacgacgcccatccacacggatgcccatacactccgacacccatccacacccacgacgcccatccacacccatgacgcccatccacacagatgcccatccacacccatgacgcccatccacacccaccacgcccatccacaccctcgacgcccatccagatacccatccacacccacgacgcccatccacaccctcgacgcccatccacacagatacccatccacacccacgacgcccatccacacccatgacacccatccacacagatacccatccacacccacgacgcccatccacacccacgacacccatccacacatgcccatccacacccatgacgcccatccacacccacgacgcccatccacacatgcccatccacacccacgatgcccatccacacccatgacgcccatccacacccacgacgcccatccacacctacgacgcccatccacacccacgacgcccatccacacatgcccatccacacccatgacgcccatccacatacacgacgcccatccacacacacgacgcccatccacatgggtgttttctccgtcaggcacattgtaaccacgtgtcccggcctcacacacagagcacttccttcccattcctgctttggctttgaagcatactgtgaaattcttcgtggctcccttctccaccaggcgctccttacacagtgctcacctatctaattacagacctgcttagaaattccaggggccaattttcaaacagaacaggcagagagactgagctgcagaatcctctgctgagggggagttaggaacaggtagcccaccgctcccaggctgaagccacaatgatagaaaccaggcctctgcacgatgagataaccatcagaacagacacacagcctggcgtccgcctgcaccactccacacagctccatgccttttcctccttaaacccctcactcagccacaaagggggaatggtctgttaaaggcatgagcctggccattccccagctgccagcgtttgattaataactgctttcctctgcccacacctcactctcatgttttcggcctctgagtggcaaacagctggacttgagccagttacaacactaggaacaccagtcagcactcagcactgtgctggggccatttaaacaacaaaaccaccaacgaaaagcacaaaaaatgtggaaaatgtggcactcaatagaccataaagaggagccttgttttacagtatgagctgaaacgagaaggcggagctgtcctctcccacctgagcacaggcatgtcaggcaacctgaactttatggctctgtgtgtgtgcaggaatgactttggcataagcattgatttgggggttacaaattaatttgcaaatacagaatctgcgaatgaacaggatcatcgactgcctagcatctgtgttgaagcgctttcacacacatcaataaccttattatcttcttcacatttttcaattttatactgtagagaggatgggagcactggagcttacaaggcttgagatccaattgtttgtttaaccgccacttcctcgcggggcgattttgcacattacattatttaccctgcaaaatcgggggaacaagacaaacattgcagggcattggaggatcgggcaggatagctgacatgcgacagggttccctctgaaccaaagctgtcagtctgtgccctgctcagtcaggaggggtctgctcctcctccaaattcttccataaaatccactctctaaattgactatggcttgtgtgggttcacacagtccccgcacgctgtactgctttctcagggagcctggttgctttccttcgggaatgacgtggttgatacaagggaggggactgtctctttcccgaccctggaccgtgcagtgaagatctcatgaggaatctgtaaatggccacgtcagggtagatcttgaaagtgtcgtcccgatggtcgtgccaggcacatctatggtaagaagcgtctgatgcaagagcaggaagagtttctgagtcactgttcctgggagaaccatccaccttttgacagtcaaattcacttaccgtgaaaggtgactcctatttagggtggaagaaatgccaaaaaggaatgctgcccactcagatgcaaacgcttcctcccctgacgaaggagggagtcttcacacaaaccttcctcccctgatgaaggagggagtcttcacacaaaccttcctcccctgatgaaggagggagtcttcacacaaaccttcttcccctgatgaaggagggagtcttcacacaaaccttcttcccttgatgaaagagggagtcttcacacacatccttcttcccctgatgaaagggggagtcttcacacaaacccttcctcccctgatgaaagagggagtcttcacacaaaccttcttcccctgatgaaggagggagtcttcacacaaaccttcttcccctgatgaaagagggagtcttcacacacatccttcttcccctgatgaaagagggagtcttcacacaaaccttcttcccctgatgaaagagggagtcttcacacaaaccttcttcccctgaggaaagggggagtcttcacacaaaccttcttcccctgatgaaggagggagtcttcacacaaaccttcttcccctgatgaaagagggagtcttcacacaaaccttcttcccctgaggaaagggggagtcttcacacaaaccttcttcccctgaggaaagagggagtcttcacacaaaccttcctcccctgaggaaagagggagtcttcacacaaaccttcttcccctgatgaaggagggagtcttcacacaaaccttcttcccctgatgaaagagggagtcttcacacaaaccttcttcccctgatgaaagagggagtcttcacacaaaccttcctcccctgatgaaagagggagtcttcacacaaacccttcttcccctgatgaaagagggagtcttcacacaaaccttcttcccctgatgaaagagggagtcttcacacaaaccttcctcccctgatgaaagagggagtcttcacacaaaccttcttcccctgatgaaagagggagtcttcacacaaaccttcttcccctgatgaaagggggagtcttcacacacatccttcttcccctgacgaaagagggagtcttcacacacatccttcttcccctgaggaaagagggagtcttcacataaaccttcttcccctgatgaaagagggagtcttcacacaaaccttcttcccctgatgaaagagggagtcttcacacaaaccttcctcccctgatgaaagagggagtcttcacacaaaccttcttcccctgatgaaggagggagtcttcacacaaaccttcttcccctgatgaaagagggagtcttcacacaaaccttcttcccctgatgaaagggggagtcttcacacacatccttcttcccctgacgaaagagggagtcttcacacacatccttcttcccctgaggaaagagggagtcttcacataaaccttcttcccctgatgaaagagggagtcttcacacaaaccttcttcccctgatgaaagagggagtcttcacacaaaccttcctcccctgatgaaagagggagtcttcacacaaaccttcttcccctgatgaaagagggagtcttcacacaaaccttcttcccctgatgaaagggggagtcttcacacacatccttcttcccctgacgaaagagggagtcttcacacacatccttcttcccctgaggaaagggggagtcttcacacaaaccttcttcccctgaggaaagagggagtcttcacacaaaccttcctcccctgaggaaagagggagtcttcacacaaaccttcttcccctgatgaaggaaggagtcttcacacaaaccttcttcccctgatgaaagagggagtcttcacacaaaccttcttcccctgaggaaagggggagtcttcacacaaaccttcctcccctgaggaaagagggagtcttcacacaaaccttcttcccctgatgaaggagggagtcttcacacaaaccttcttcccctgaggaaagggggagtcttcacacaaaccttcttcccctgatgaaagagggagtcttcacacaaaccttcttcccctgatgaaagagggagtcttcacacaaaccttcttcccctgatgaaagagggagtcttcacacaaaccttcttcccctgatgaaagggggagtcttcacacaaaccttcttcccctgatgaaagagggggtcttcacacacatccttcctcccctgacaaaagagggggtcttcacacaaaccttcttcccctgatgaaaaggggaatgttcacacaaatccttcttcccctgacgaaagagggagtcttcacacacatccttcctcccctgatgaaagagggagtcttcacacaaacccttcctcccctgacgaaagagggagtcttcacacaaacctgtcttcccctgacgaaagagggagtcttcacacaaacccttcctcccctgacgaaagagggagtcttcacacaaacccttcctcccctgacgaaagagggagtcttcacacaaacccttcctcccctgacgaaagagggagtcttcacacaaacccttcctcccctgatgaaagagggggtcttcacacacatccttcttcccctgacaaaagagggagtcttcacacacatccttcttccactgatgaaagagggagtcttcacacaaacccttcctcccctgatgaaagagggagtcttcacacacacctgctgcctagagccctcagaggtgtgatactcgaacaatgtgttcacatgggtcctatgaagaatatattaggagaaacaaaagctatttattgccgctaggagtcatctcccaattgggctggaaataacatgaaaaaatatatcactgagattctacagaattcactgacttaaaactacctttaaccaaaataaggaaaccatatatgttgtacatagataagagatcatttcatcactgtaattttagctatagttacctctattttaaatatcattccatttattcctgagttctttatcactcagtggttccacttgatagtttactatatattgataattgctcatttcttttgatggtcataaaacatgccaacaaagaagagaagtgacatctagcattttaacactgattttattgcttgtgttctaggatactcctatcactcaagacttatgagacaaacataccagccctccatcaaccagactgttgagtgtaagagttctgcgtaaaaggccttttcttaactgaggactatttggaaatctctttttcccctacttttatgagtgaaataatttaaaaatacatataattatctgcctttagaacatcaatatactgatgtactaatatttgttgtcttagcaatcatatatctcaaagtgattttctgaatattagttttcagggcatgacactttaaccacaggaaagaaaacactgagctccatctgttcttagaccaaccgtccggttgagaatgaagaagatgaacaaatctctgacaaaagcttccatgtttcggaaatggttttaaataagaaccgaggcttctatttggttgggttagtctgggggttgttatttctgtatagtaacgactatacagtcgatacataacacaggcttatttgtatcaagtcaacctttaagggctacaataaatgtaacacatttgactacagttttctgaatagacactgcctaagcagtagttaacaagtttgtagtccgtttaaataaagacaggcctcaggtactagattcccttgactttttgtggataaaaagaagatagccaaggcatatatggcaacaaatatagttttaaagttaatcatttaatgttgatgctttacaaccaacataaaagtaaatgcttctcttttcaactggtgaattttcttgaaagttatttagaaatgaaaaaaacaaaacttctgtagactgttttttgtttgtttattttactagcatgctctctgctggcttgacagactgacctgtgctttatctatttgacacctggatttggagtgaagcccataacatgaatagatgggtgcgtgagggataggtgatagatggatgggtagagagatggttgggtgagtgggtgggtgggtgagagataggtgatggatgggtagagagatggttggttgggtgggtggatgggtgagggacaggtgatagatagatgagcagagagatggttgggtgggtgggtgaaagataggtgatggatgggtagagagatggttgggtgggtgaaggataggtgatagatggatgggtagagagatggttgggtgagtggatgggtgagggataggtgatggatgggtagagagatgggtgggtgggtgagtgagggataggtgatagatggatgggtagagagatggttgggtgggtgggtggatgggtgagggatcggtgatagatggatgggtagagagatggttggttgggtgggtgggtgggtgagggataggtgatagatggttgggtagagagatgggtgggtgagggataggtgatggataggtagagagatggttgggtgggtggatgggtgagggataggtgatagatgggtagagagatggttgggtgagtgggtacatggatgagtagatgggtgaatgggagggcagagatatatatacacatatacatgtatatgtgtgcatatatatatatacacacatatatgtatatatatgcatacatatatacatgtgcatatatatacatatatgtgtgtgtgtatatatatgtaggtgagtgggtgggagggaggatgggtggatggatggatagatgggtgggtgggtgggtagaaggatggatggatgggtagagaggtggataagtggatagatatatgggtggatggctggctggatggatggggaggtagacggatggatggatgaaaaattgataggtgggtggtttggtggatagagatatgtatatatttattgcttatattaattcaaacataattagacactttctcaaaatactgtttatagcttaagaatcattttgcattaaacctttcccatcttgtgggctatacatttagtgaattgctcattctgtttcttagtcagtattatgttcagagaaacacagtgctaataaaggtctcaaaattatcaaacaaaatcataatgatttaagagacttactatatctggctgaacataatttgaggccaggtaaaacctggaagagctcactacacacagtacatgttttaggggctccctaaagccagcccctcagcctcgaggtagaggcacaggggaacttccaagaaaccagccctgtgtctggccttgagtaggtgggcgcaaaccaagagagcacgctgctgtggtgctcggtaacaaccacaaaatttgacctaaggcaactcatttggcaatcgctattttatagatgaataagttgaaacccttgtagttttaggtgctagctccaaatagtccaattctaatatcaatgccaccactagaatcacaacttcggcgttcttggctgagagccttctgcgaggcacgagtataagtgtgagacccacacgcaggcctgcacctctgtcctttcctgactctgccgctggaccgacccccacaccatagacccacacgcaggcctgcacctctgtcctttcctgactctgccgctggaccgaccccccacactgtagacccacacgcaggcctgcaccgtcctttcctgactctgccgctggaccgacccccacactgtagacccacacgcaggcctgcaccgtcctttcctgactctgccgctggaccgacccccacactgtggacccacaggtaggcctgcaccactgtcctttcctgactctgtcgctggaccgacccccacactgtttgtgcttttactccctgaattgttcctgatgataacttgcctcctccagtcttgttccttgttcactggcgtccctcactctaggcaagcccacagcttggtgctgggctaatccaagctaccgacagaaaaccaataaaaaaatgagctcacgtctggctgctacagaattctctttgcatgcctcattccagctatgtcttcttacagaggagacatcgggaacataaaactccggaattccacgtggatagcataatgcatacctactttccttacacacacttttaattttaccacatttcctgcacaattgtgtattcctgcctctcgtacatgaggcaataacttcccaaaatatctagcctaagagcttacaaaggaggaagaagagagaaccaattcttatttgaatgtatgaggaaacaaagacacacacagttattgcaagataatttaacatcatgcaagccttaatgaaaacataattattaatgatgctttattttcttaaagcattgagcaactgcatcactgtgcagattgtatcttctttgcaattactttgccattacatgggatttgggaaatcctttctgtgccagggaatgtcttgccgcttacttttctcatggagtatttggaagaaaacagattgttcagtatgtatgctttgcctttgaactttagaagcatttgcctcctttgaagttctactgcaggctgctttcctgttacacctgctgggtggcatgaccagtcccaagagaagacccttgttcccccagcacaggggtgggccggatctcaccaggagcagcagaacgctcgccattcccgaaggaccagggccaccccatctgtgttttttctgttttgtttttgtttttgttttcagacggagtctcgcactgtcacccaggctgcagtgcaatggcgtgatctcggctcactgcaacctctgactcccgggttcaagtgattctcctgcctcagcctccccagtagctgggattacaggcacctgccaccatgctcagctaattttttttttaaaatagagatggcgtttcactatgttggccaggctggtctcgaactccagaccttgtgatccgcccacctcggcctcccaaactgctgggattacaggcatgagccactgctcccggcccccatctgtgctttctattgcagcttcgctctcatgatgcttaaggattaatgagctacacaaacacatgactgaattattagtgactaacatttagaagtagaagcattcacccaagaattaggacccaggctttttcccgaagcctcagcagcttggccacagccttcggtgctgtaggacaggcaggaaaggtgagaactcctccccctgagtgttcctgagggctccactgcgcagtccccaccatccctcagggtctcctgggcactgtggctcactctggttttgtttcttgttttacttttgtttctctggacacgcaggctgctaactcccgaaggcaactgccagccttcaaacaactccagtttgcaatcccaaatgaagtgtaacgcacactcatgggccagcatccgtggtgggaggagccgctgggtcctgtaactggggcaggtttatattcctccctgccctgggttgcaggtctcagcctttcctgcaggaggtgagtcctgaataacctgccccgcccatctgccccaaagcctcctgcaatcagctcatgcgcaacgtctctgactggagagacacattcggaagagtgaagtgatttttatttggtcctggtgagaaaaataagaataacgccaagcagggtatctagtattgacggtgtaggtcataagtaaaatgcatattttaccacagtgtttggtgtcatttctatataaatctaacttgttcatgtgtttacatatttcttggcttagacattttattactttaataatgtatctggaaagctaccctttatttggtgttaagtatctgcatacgcagggcatttaattctacaactctgatgtagacattatcgtctctactccatggaggagcacactgaggccaggtggcttcagtaatctgcccagggcctcacagcaagttgagaaaaacagagtcaaacccatgtgcctttgaattcagtctgcccattctttcgtggaatcattcattcactcattcaacaaataagcccctgttatgggccagaaacactctagtcactgatgacgcatgattgagcaatacagactgaggccctgccttcaaggagcgtaggagtgtatactttctggttctggttttgcagagacgaggtcttgctatgttgccctggctggtctcaaaactcctggtctccagtgatcctcccagttcagcccccaaagtactgggattacaggcgtgagccgccgcaccaggccaggagataaaagattcaagtcctatggatgaaagtgcctttacaagaaaactcagaactgcctgggaaactcttcactacctggtgtccagtacccaaatccagcatttacccaatgcttcacacttgaagtgcattgaaaagtctagagaaaagaatgggttcttcttgccaatctgaatccattaacagtagaaattagagtgttttttttcctaacagcaatgaaatagcgcaattgtccagctaacatgtattgcaaacctccacagcagacgttattctagtttttcctagagtctctccaaccctgtcatggcctcacagccgtatacataatttgtggggccctttgttgaagaattgtaagagtctcaagatggtaccagcaaagcatgaaccatgtgtggggcctctaagagccgggtctcagccacatgcccaggccacctccatccttgtggggaaactgaggctcaggaaaataaggaaactgctctcctcctaaatggtcatatcatttcatactaggaaacaaggctccaccaatattttaaacacaaatatctttaatcaaatcatgggattcacttaacctgagaaatgccacctttcactcaaacagaattattatttgcaaatccacagtggccttcccttgttgtctcatcttaaagacgggacggggagttttgacgtactgtgacatttccttgacattccttatttccaggaaaacctcatgtcactgtctcgagacactagcttgcacctttgcaactgcttgtaatattcagacagggcactgaagacgaagcctgggctccgtttgggaaggagagttacataacatgaggccccattccccaccttcctcacttggcaaatccagaacacaggtgaaacaggtagcaacattgcccgtgagggccggagtctgcaggtggtggatacaccacatccagatgcaaatgccatttacccagaccctcccctggggctcctgggagtttctcactgcgggggctcttggctttgagtgatattactaacgcacagcactgtcgctgcagtggttaatctgcactgccctgatgtgtagacaaaattatccagggctttatagtcatcgaggccacagggaaaaccagagagccaacccagggaatgaaggaccattctcacccctcacaggattcctgctgcctacaacatctttgtaaatcccctatgcatggggacaagactaggggcaaaacaatcacaactctgcccccggaaactgaaacatactttccagaagtttcccggcaaaccccagggacttctcccactggcagggtgggagaggggcaggcactggggaaggaggtggaggggcccgggcagcactggggttgtcacaggatcgagcaggcacaggcacctcccgcgccccgtgcacagagaagaccccaacaagaagcatcagggttgagaattcccactgctgcctcttcggtaataacaccgtattcatcaatccagtaaatcacacagatgagaaagtaaacgcttctcccaccaggagagcacatgaagattgatcacagaattaggctgcgtgccccgaatgccccggcggtcctcgtggctgatgtgggagctccaccgaagccatctggaagagaactgtcacagagcccgtctcactgtggactcaggggctcgtgggaatgtgtctttggcatcctttttcccaggagcactgcccacctccccgagattccgcggaaggcggcctggcatcgatcaccgccgccgcagacagccacaatcacgtcgtaaaaacccggctgcggtcactgccggtctgctggcataattacatcacatgctaatgcagttttaatggtctctaatgatgtcataagaaataatgggatttatgtgacagctacataaccactaacaaaacatattcagcataactagcacttccacaaaaccgcaggagagtctgagagtgacagcttgcgcatcctgtccgcctcttttcctttcccggaacaatgagcagctcccagaacatgctctgacaggcagcaccgcgtggccgtgtctcccgcctgtcagagctgctcccctcgagacaccaacgaggcacagcccacacccccgtccgtccctcgagccggtgcatttgccaagtgtgtgcccgtggctgctgggcccgggtgaggcacaggacgtggaagtaaggcttgcgtggtcccctgcacatgagcacacacgcacgcaggcaccagaactcaagacccagcgtggggcagcctctgcctggccaggactggggacctcggagaagcgctggacgcagcaagaatcaggcttcagctccgcaatgtgggcaggggacccgcaaaggatcctgcgggtgaggccaccgggggggctccctggggaggaggtggagaggtccagattcccgaaggctccgagggacgggcggcgggactcaggtttgactctgtaggaaagagggggccgccagtgtcctaaggcgggagatgcccgagggtgacgcttacccaggactgagcctggcaaagcccagccctgctcccggaatgcggagaagccgtccgtgctcagaatccgtcttccgacagcgaaggcggtggccaggagggccaggggcagggagcaggcacgggcgaggcccagctgctctgtgaaaccagaggctccccgaggcacacgcctccctcgcccgccccggcctggcatctgccagtcccaccattttgctgagactctgtgaaggtgaatggggttgcttgggctcggggactggaagaagaaggacgtttatctcgtgaacgcgggacgctccttatgggagaggagtgggagacatgaagcaaagcgtgaccaccgaggagctggggagaaagcgagaaagcaaggaagcagtgggggacggggaacggggccgcggggagggccggagaagatggtagaaggtgacagtgcggggtgcagcgttcctgggtccttgaggggagccgggcttctcagccttgaagacccacttcttctctggcctcattcctgggttccgcatcccggctgcctccccttcctcccccaacacatcccggctgcctccccttcctccccccaacacatcccggctgcctccccttcctcccccaacatcccggctgcctccccttcctccccccacatcccggaggcctctccttcctccccccacaacccggctgcctccccttcctccccccaacacatcccgggtgcctccccttcctccccccacatcccggatgcctccccttcctccccccacatcccggctgcctccccttcctcccaccacatcccggctgcctccccttcctccccccacatcccggctgcctccccttcctccccccacatcccggctgcctccccttcctcccccaacatcccggctgcctccccttcctccccccaacacatcccggctgcctccccttcctccccccacatcccggctgcctccccttcctcccccaacatcccggctgcctccccttcctccccccaacacatcccggctgcctccccttcctccccccacatcccggctgcctccccttcctcccccaacatcccggctgcctccccttcctccccccaacacatcccggctgcctccccttcctccccccaacacatcccggctgcctccccttcctcccccaacatcccggctgcctccccttcctccccccatccccggctgcctccccttcctccccccaacacatcccggctgcctccccttcctccccccacatcaccggctgcctccccttcctcccaccacatcccggctgcctccccttcctccccccaacacatcccggctgcctccccttcctccccccaacacatcccggctgcctcctcttcctccccccatcccatcagtggtcatgcttcacttcctctccccactcctccctcataaggatcattgtgttcatgaaataaacttattccttctttatttatttttattttccataggttttgggaacaggcagtgttgagttacatgagtaagttctctaatggtgatgtgtgagattttggtgcaccctcctgccacccttttccctgagtctccaaagtccttatgtcattcttaagccttcacatcctcatagctcagctcccacttatgagtgagaacatatgatgtttggttttccattcctgagttacttcatttagaataatagtctccagttccatccagcttgctgtgaatgccattatttcattcctttttatggctgaatagtattccatggggtgtgtgtgtgtgtgtgtgtgtgtgtgtgtgtgtgccacgatttctttatctactcattgattgatgggcatttgggttggttccatatttttgcaattgcaaattgtgctgctataaacgtgtgtgcaaatatctttctcgtataatgacttcttgtcctccaggtagatacccagcagtgggattgctgaatcaaatggtagttcttttagttctttaaggaatctccacactgttttccatagtggctgtgctagtttgcactcccaccagcagtgtagaagtgttccctgttcaccacatccacaccagcatctactgttttttgattttttgattatatccaatcttgcaggagtaaggtggtataacattgtggtttcgatttgcatttccctgatcattagtgatgttgggcattttttcatatgtttgttggccatttgtatatcttctttcaagaattgtctattcatgtctttagcccattgtttgatgggactgtttgtttcttgctaatgtgagttctttgtagagtctggatattagtcttttgtcggatatatagatcatgaagattttttctcactctttgggttgtctgtatactgctgaaagaaatcacagatgacgcaaacaaatggaaacacatcccatgctcatggatgggtagaatcaatattgtgaaaatgaccgtactgccaaaagcaatctacaaattcaatccaatccccatcaaaataccaccatcattcttcacagaaccagaaaagacaatcctaaaattcatatggaaccaaaaaagagcctgcatagccaaagcaagactaagcaaaaagaacaacctggaggcatcacattacctgacttcaaactattctataaggctatagtcaccaaaacagcatggtactggtataaaaataggcacacagaccaatggaacagaatagagaacccagaaataaactcaactacttaacagccaactgatcttcgataaagcaaacaaaaacaaagtggggaaaggacactctagtcaaaaatggtgctgggataattggcaagccacatgtagaagaataaaactggatcctcatctctccccttatccaaaaatcaactcaagatggatcaaggacttaaatctaagacctgaaaccataaaatttctaggaaatagcattggaaaaactcttccagacattggcttaggcaaagacttcatgacaaagaacccaatagcaaatgcaacaaaaacaatgataaatagctgggacttaaactaaaaagtttctgcacagcaaaagaaacaatcagcagaataaactcattccttcttccagtcatctagcccaaacaatcccactgtatacaaagaaagacctcacaccttccattgcaccaaaagagtttaaaacccagctcaccatgaaagccatggagactttaaaagaaatcccacctggtatttaagaaaatctcacccagcacagtagtgcacccgtcagcctcaggtctgctccaatcagtgtggacagcaaagcccctggccaccctgaccgtccagctgttggccatgtggccaaccactcctcccttcttcattctggcccaccctctcccaggggatgttactgggggagggcagagatggccaaagcagtgagcagcggcaggcccatctctgcccgtcactacgccacggtgggccctgaggtcccaggatctgctcacagtgagcagccatggagcttgcagctgaccctggggcccctctcctgtcctgaggatgaagtggttcctctcccaagccccagatcgcaaactggacccatgtggcaggcactgagcccaggtgccaggcagccctcagcccacgccttcaccctggagccatgatgctaacagtgcatggcagccatcagcagcagggcggccaggagggaaccttcagaaaacactgagcccctgtgcgcctgagccacggccttccacgtgctggacagccaccacagaagggctttgccagaggaaaatatggtaaactcaatgcacgcatcccgagctggcccgaggatgctttattccaaagccacctcttgtgactgcctgccctctgcccaattatctcagttatgtgtctgggtgcaacagcttcctccctcccatggctccaggccgccctgctgctcatggaggcacctctcatggtacccaggctgcttcttttccatggccctcaaatgtccctgaggacaatctcacttttaactaaggaggcatccacacctccacacgttcatcagtaattgtgggccttggcagcaacaggtgagtttcccagggctgcagaatcacagagcatgccccatgtatttgatatatggagagaggcagaagggggtgtgggatgggcctgcagctttgcgggtgttggagggatgaggcctttgttgttcaaggactcattgcatcacgcttgaatcacacttgcacttaagatgcaagtgtgcacttgcacacttctctgcagtcactgagccgggttcaggacatagataggcactgaggagctgatggtctggggagaaagacagcacacggctaatgttctgggggccacggtgcagggaaggcactgcagacccgggaggacacacccccaggacagtacctcatgctcctcagcggcatcagagctgagtcctagacagggagcctgacgggacaggagctggggcatcagtccatggggaacccctccttctgaaataagccatcagcaggacccagtaaggcctgggtgtccagacatgcacccgtccctgtctgacagcagaagcaggcgtgagcacctagaacaaagggcctgcggtcattggctgcagtcagtgtgaggctcccacttaccacctgtggcctcatcctccctgtgcgcatggcctgggcccacgatgagttcctgagtcctaaaactaggcgccttcctgggggccatagggagggatagtgccaaagatacaggcctgggatggaatccttcgtggaaaggaatgcagtttgaaccattcaggacacttgatggcaggtggctccttccagttcaaagtaagaggtaaaaagccttaaaataacagcagtaggaaaaagaacgcgaagagccctgcacacaggtgagactcaaagaccatcaggaaaactgcactttctggactaacgtggctgtgcccatggagcagcgatgtccgaggcagggcccactctctgggccccaggagattcccttcctctccagcctcacttccctagcatgagttgtactcagaatgtctgaggtcactggcagttccagaaccttctctagcactgtccgatttgtttgtctcatgagccaggtttcaaacagctcaggggcagggatgagtgttccccttcttacatgtcctgctctgtgccaggtcagtgcaggcccccacttgatgtgatggacaccaatggtgtcgggggccacagcacactgctctttgtaatgcccatgaagtcagatcatcccactcagcccatgatggttagcagcctggacacatttccttctggttcttagagacagattattattattttttttttttgagatggagtcttgctctgttgcccaggctggagtgcagtggcgcgatctcagctcactgcaacaactgcctcccgggttcaagcaattctctgcctcagcctcccaagtagctgggattacaggcacctgccaccatgcccgactaatttttgtatttttaagtagagatggggtttcaccattttggccaggctggtcctgaactcctgagctcatgatccacccgcctcagcctcccaaagttctgggattacaggcatgagccaccgtgcctggcctagagacagatttaaggcaatggagcatcagggcatcctgcctgagatttcttttctgtgcttcctcactatgccctccccagagcagtctgaggcatcagaaggcctgaggaaggccaggatgaagacaatggaggtcaggtgaatctcaggctcaaagactcctgagaaaggccctggaagacacataagaatcaagacaacttaagagcaaagataccgctgtgaaaatcagggatttgtggatggataaaaaagtcatagatgaggaaatagtaagacaccaagatcagcagcagggcccctcacaagatgaaaaaggagatgaagactatagggctcacctaggcagggacagagaggagaacagaagggagaaaagagagagaacaggactgatggaggccttgtcagtagtggaggagagcttgaggaagagccaacaaccacccatgatcacaaccatcccagctccatcccaaaatccatcccagctccaaccagcaccaaccgcagctccatcctcagcactatcccaactccactcagctccatcaaactccatcccagctccatcctcagctccttcccaactccactcagctccatcaaactccatcccagctccaccctcagctccatcccaactccacacagctccatcaaactccatcccagctccaccctcagctccttcccaactctactcagctccatcaaactccatcccagctccaccctcagctccatcccaagtccacacagctccatcaaactccatcccagctccacccttatccaaactccatcagaactccactcagctccatcaaactccatcccagctccatcaaactccatcccagctccactctcagctccttcccaactccactcagctctatcaaactccatcccagctccatcctcagctccttcccaaccctactaagtgtcatcatactccatcccagctccatcctcagctttatctcaactccagtcagctccatcaaattccaccctagcttcaccctcagctccatcccaactccactcagctccatcaaactccatcccaactccaccctcagctccatcccaactccactcagctccatcaaactccatcccaactccaccctcagctccatcccaactctatcccaattccactcagtttcactgaactgcatccgagctccatcctcatcctagctccatcccaactgtgctcagctccgtcaaactccatcccagctccatcccaactccactgagctccatcaaactccaccctagcttcaccctcatcccagctccatcccatctccactcagctacagcagattccatcccagctctaccccaggtacatccaaggcttcaataatccccagctccatgaacttccatccagctccattcctatccatccctactccatcccaagctgaaccaagctccatagacttccatccagattcatcaactctatcccagaccatggagctccatccacctccatcccagctccacctcatctccatccacaaatccatcccagctctatccatctccattgtatctccatccagttccatccagatgcatgccctgctttatccttatctccatcaatttccatcctagctccatcttacgccatgcagccccatccagctccattgcagctccacccagcttcatcccatctccatactactctatacccggctccatcactactccatctcatctccatactactgtatacccagctctatcactgctccatcccagctccatccagttccatcccctccttcatccagctccactgaattccatccccatctctcttctgttttattcccagctccttccatctccattccaactccattcagctctatcctagatcatcactgctccattctagctccatcctgctctgtcctcagattcatctcagctttttttctgagcttcatcccatctccatttccagttccttccctgatctatcttagctctatcccagtccatcccagccccatccacctagcttccccgcagctccctctagcttccccccagctccatttctgctctatctcatttttatccttattccttacaagtggcatctccagctcctttctgagcttcatctcagctcatctccctctctcttgagttccatcccaacctccacctctgctccctcccagctccagcgcagtttcctccaaagctccaccatcacctccatccttggctccagcttctttcttagctccctccctgcctccacacacacacctccgtgtatcatctggaagaagctatttccaccttttctgactcactgtttatcactgctcagaagtgtgccactttgggaatatccaaaacactgataaagaggatgtctccaggggctgatgaaatgagcctctccacacaaacgcctacctgtggagtctgcccttggggatataaccctgtcacactatctgtgccctgctccccgaaggtgatagagtgcctgttacatgattttcactagtgtcccaggtcacaggttcacagaagattaatccttgagtaatcactaaagatgaagtaggcaaacccctctaattttcaaaatataaaactatggcccagagaggaaaagtcacttccccaggatcccataaaaccagattatctaattctccttcagcataaagaggaagattttaagatcctggaagcatctcagctctttcaggtcttgggagcttcttctattttcaacctctgtgaaatctgtcctgtgtggtttccctagagttaatatttcttccctaggaacccaaaacactgactgggagctacctcacaagaaaccaaggtggtgccaacatgcacacttgtctctgttctcacatacacctaagggtccacgtgccccacatcgctgctgccccccttctcttcccttacctccatctcctgatcccatcagaaactgggatcttgctgtccactgtacattaaggttatgtcatatacacctacccagatctgtcccctaagtcacctggacagcaccccttagaagtcatccaggtacctgaaacaaacctatcaatcaaacctgttaggaagctccctcaaaccctcccccctcctaagtccctggtgtgctgaaagccactccatacatttccagtaccctcagtcacatcagaagttaaaacactgaagtatttcctaccaggtgggaaacagctgcagcccctgcccacccgccacctccagaaccccagatgcccaaacatcccaggccactctgggaacaacaggccctccccattgtgagccacagggaaaacacttgactgcccaggggccaccaggacttctgcctgaggccctacttgcctgtttccatgggcaggcatcacactgtgtagatcaacacacactttgcactcagatctaccctcatccttgaagctgcctttctacaattcttcaaatcctgcttcccaggcagaagtcacccagtggccacccactgcagtcacgctgtacctgctctcttccctcacctgcatcttctcgtgtcccctgcccacagcagcccatgaacatgccccctctttcatgtggatatctgcatctgccctgcacctgccccctctcacacatggatccctgcacaccgtctgcccacagcaggcccatgtacctgccccctctctcacatggatctgggaaagtcccctgcccactgcaacttgatgcacctgccccctccctcacctggatctctgcacctctgctgcctactgcaggcccacacacctgccccccaaaaaacatctgcatctcagcatagccccttcctactgcattcaccctgtgcctggtcccactcttacctggatctctgcaaaccacctgcccactgcagccctgagtacgtgaccctttgctcacctggatgtctgcatgagcctgccaattaaagccccatgcacctgccacctctcacctggatctctacagcccactcacccactatagccccacaaatagccccccctcacctggatctctgtgctcccattgccaccacacccgccttgcacctgctccctcctttaccttccccaggtggcctcagggctgctctctctcagctctagtcagaccatctcactgtgttcaccctgtagggtcctctcactctacatactgggtccctaaatggcctctctgtccctgctgagcagtcctacctggcctgcccaccggaccaccccatttcagggaaaccccagcagccctggcatgtatggagccccctgtccctccacatctttcctgtccatggacatttccttgaacctgctcattgcatatgtctgtaccctaggaacggtgtgggccacagtgagcagtgtggagttgcatgtcacatctctctctgggacgcctccatgtgtccttcagatttctacttctagaaacttctgatcccaggctggctggggtgcttctcatgcatgtcccctagtgccctccatgctaatgacccatacactcttctgtcttttcctaataaatggcagaattgaggcagggcccatgtatctcaaaggggatgcccagctcctggtgcgaggccaggttgccacaggtgcccagtgagcatctgctgtgaggagccactgagtgaacgaggtcaacctgtgtgaaggggccagtgagtgaatgacatcaaccctgtgtgaaggagccagtgagtgaatgacatcagccctgtgtgaagagtcagtgagtgaatgacatcaccactgtgtgaaggagacagtgaatgaatgacatcacccctgtgtgaaggagaccgtgagtgaatgacatcacccctgtgtgaaggagccagtgagtgaatgacatcactcctgagtgaaggagacagtgagtgaatgacatcaccccatgtgtgaaagagacagtgagtgaatgacatcacccctgtgtgaagactcagtgagtgaatgatgtcacccctgtgtgaaggagccagtgagtgaatgacataactcctgagtgaaggagacagtgagtgaatgacatcacccctgtgtgaaggagacagtgagtgaatgacatcacccctgtgtgaaggagacagtgagtgaatgacatcacccctgtgtgaaggagacagtgagtgaatgacatcacccctgtgtgaagactctgtgagtgaatgatgtcaccccatatgtgaaagagacagtgagtgaatgacatcacccctgtgtgaaggggccagtgagtgaatgacgtcaaccctgtgtgaaggagccagtgagtgaatgacatcacccctatgtgaagactcagtgaatgaatgacatcaccctgcgtgtaggagccagtgagtgaatgacgtcacccatgtgaagagtgtctgaatgatgtcacccctgtgtgaaaggctcagtgagtgatgtcacccctgtgtgagggagacagtgagtgaatgacgtcacccctgtgtgatgagtcactgagtgaatgatatcacccctgtgtgaagcgtcagtgagtgaatgacgttaccccggtgtgagggagccagtgagtgaatgatgtcacccgtgtaaagagtcagtgagtgaatgacgtcacccctatgtgaaggggacagtgagtgaatgatgtcacccctgtgtgaagagtcagtgagtgaatgacgtcactctgtgggagccagtgagtgaatgacgtcacctgtgtgaagagtcactgagtgaatgaagtcaccctgtgtgaagggaccagtgagtgaatgatgtcacccgtgtgaaggggccagtgagtgaacaacacgtgtaggcaggcacccctcggtccacaggcaggtgggcacacagcccgggccggcctcttgtctcacgtcctctgtggatgtcactctaccctccctcttctctctgacctctccacacccagctgtgcgctgtgggagctcctgcagcttctgcactcagccatctctgctccaagcttcacatatgcacgcatggttcctcaagcacttgtcgtgagacaggtaagaggctgcccctgtgtgtactcacccaccagccctgcatgcctcatgcccacaactctctaaaccaggtcacgctgagaccatggccatgcctgccatggaagctgcagagactcgggatccaaagccaggtctccgaagggcagcgcattttcctgacagccagggacagggccgtgtccacagcaggtgctcatgaacgctgcacagtgttctctggggtgggccctccagaggctcccacacattggcataggacatgtgcagaatgttctagagccttcggtggttacagcaccaaaggtttgacacttggctgcagcgacactgtccttcaggagattttcatccttccccttaaacactggtttccactgcctctaaataacttaccaaagctgctgaaatcacctttcacttctctaaacaggttccctcatgtaattaacaagagccatgggctcgcagctccttccctcccacccagtctctgcgaccaagcaacaggagccaaacagaaaccccagggccccgtacttactccacgtcagcgaacgcactgctgggcacctgcaggaggcgggcgacgtcctccaccagccgccttccttcctcggggcgcagggggctgcggatgacagcagggatggggagcagtcaccacagagccagcagtcctggagaactaaagccctgtggccccacagccccgctccctggtccccacacacaccctgctctcctggcctggggtcagctgccccctcaggcacaaggagtcacctgagtttccagcaacaagacaaacagtgcagtgcggacggggctgtgggaatcgcaagtggcccaccgtgtggagactggctcctctcagccttcagtgaaaatacaataaaggggagaagggagaagggacaggcaggtgcggcggatgctgggactctgactgaggatggggcggatccatggagaaagcatctgtttttaatgggctcatttctgatgtgaaccaggccccagtgaggggcaatttaactacccaatggaagtgtgagcatggaaaccaggcagccagcccactggcagcaactcagggcagggggcgggggcactcccggaaggcactgtggccgcagactccccacaaggccacctggctggggacctgtccgtcaagaggcaagagccgtcaccagggtggtttgcagcttgatgactcatcctgaaggccagcattcaggttgaaagtcacaagttgcctgtgaaatcctgttagtaccactttaatggagtattaagttacaatattatgtaaaagcatgttgtaccgcaaaggctttcaccccagcagaccaaaacgcctgcattcctcatccagtgagcgtgcaggatgcctgcagggcaccaggagctgcttccaaatacagcaatgaacagcaagaccagccctgccctcgaggggttcacattctagagatgctggtgaatagaaatcaatcatgctatgatgggttgaattatgtcacctaaaaattcatatgttgaaatcctaaaacccaaataatgtgaactgatttggaaatagggctatcatagatttagttaagctgaggtcaatagggtgaaccctaagccaatatcactggtgtccgtataaaaggagggtttggactcagagacaaacgcacagggtgtcgcaaagacatggggagaaaccacccacaagctgaagtcatctcaggccagtagcagcaggggcgaggctgggagcagaccctcctcagcctcaggggaaccagccctgcccacacctgggtcttggacttccagcctccaggacagggagaagatggatttcccactttggaagtgtgcgccagcagcccaggcagactagctcctgtcggctgacaagttctctggaggagacagctgggtagagaagtggcatgcagggctgtggagggaagggcagagaggagagactgtcttgtaaagtgggctataggaggcctctccagtggggccccgtttgaacagaggtgaaggagctggaaacagggtatcagacagtgagcagagaaggcaagggggccgcggtgccacatggtgaggaggtgaagtcacagagcagctgggtggacatggcctggagacgagtgcaggaggccgtcagctggggcaggggcctgagctggccaccacggctgtccggtggggagcctggggatctggagggacatctgaggccatgccggtggagtccgctggcactgggaaaacacaagatgggcagaagccccaggaaggcccagctgggagtggtgctgacagagtcaggagtttacatcctgcacacgtggacatggggaccccagcagggcgtccaggctaggtgctgaggggcgacgtgtctgtcagtgcagaggtcaaaggccccagcggggcatccaggctgggtgctgagggcagtgcatccatgtgtgcagaggtcagaggccccagcagggtgcccaggctgggtactgaggggcgatgtgcctgtgagtgcagaggtcagaggccacagcagggcgtccaggctgggtgctgggggcagtgcatcatgaatgccgagaccggggagctgtacgaccagaggtgttcactggcctcaggagggtgactgaagctggagcacctaagacggagccttgccccccagcatttaggatcccccagcattgagggccccccggcatttagggccccccagcattgagggccccccaacatttagggcaatgaggggaactggcaaaagagaatgaaaaggactgtgacagaggcaagcagcgagctggcaagaattccaagaaggagaagggccgggcctcagattggtccagagagatgaggatggggagctgaggccgagcttagcgggtcatgatggctgtgggctgacctcacaggagctcttctgcaaggctgtagggacctgcagcctgttcagcattggagggatggagagtaggaaaggagagatggggccaacactgtaagagctgcccagggttctgggggcaagaggggcagtttctgttaagctggaagacgtctaggatgctagcatagggataggagtgatgagacaaggtgctggatgtagggcatggctgtgtgtgcccagagcaggcagaggccttaggcaggagtaggacaatggtaacagaactggcaccagggctggagaccccaggcattctctatccatgacttacactcagggaccccttggggagaggacctcagcagggcctgcagattcagactcatgagcaggcgcatgccgtgactagtctagcctcagagcgcagctgcactagctggagagagagggtagttcttgggggttatgaatccttcctggggacagagagacgcattgaggtggattctcatgggcctcgcacctgcaacaagaaagccatctgatggcgtcgacgctacaagctgttgttgtggccaccagggacacagcctaccatccttggccaggacttcgaggcacgtagcaatccgggaccagctggggcacaggccgccttccactcagggaggagccacatctgagctcaggggctgagcctgtcccaaaagcccggtacctccagggagaccggtggcccctacatctgggtacccctcagagccacctggggagggtgtccaggcccatgcctgtcctgcccagccagtgtggctgcaactggagcccaggacagtgtatttaaaataaaaaaaccaaaccaaacaaaaaaaccctttgtaggtgaaggtgacagctggtccagtttgggagtggttacagcaatggaaaggtgaggctgcatccacgtaccacaggccttccctgcccagtccagggctctgggacctgagtgggccaaggactcaccaggatgggccaaggactcaccaggaatgcagatgccccagccaccctccagcgtttcggagtcaggaggccacaggtcaggcctgggaatctgtgtttctcgtgggttcccactggtgctgacacttgttcaggcatctgctttgggaaccccttggccaaactcccacaccataaaatcagcaacaaagccacatgacttccaaccctagactaacgtaggtcgctcagcttcaggcaatctacacatcagttgggagggatgtggaagacgtgccgcgggaatgctctactcttcatctaagaaatacttcctgagcacttgtggtaccaggctgagccaggagctatggaagcagagatgagagaggaggaggagccagcggcccccggcagcctctaatctggcaggaacaacggtaaagaatatgcattaaaaaacccatggcaaaccccagggaaaagagaagccaccggccacggccctggggcctacatgggagcctggtccaggctggggtaagggagccccagaagggtccccaagaactaccacagggctgagagaatggatcgtgttactagtctaaggcacagagcgcgagaggcagacgcagggatggaaacagcaagcaaatgccctcgggtagcacagtcactcagagaacttgagagaaggggcaggggaggcacggatggctagaaggaagggagccaactacatgggtgctcctcacccattaagggattggagtttatcccaaatacaatggcgagctatcaacagggcctaggcaagggcactgtcccactctcctggtcccagcttctcagaaggctgaggagccaagatcactggagtccaggagctcaaggctgcaatgagctatgattgcacctgtgaataaccactgcatcccagcctgggtgaaagagcaagaccccatatccaaaataacaacaacaacaacaacaaaagttccctcccctggataaagaacaggttggagaccagaggagacagaagggaaacagctggtggcctccagattgtctcaatgagacatgagctcaagcagcatggaccgtggtaatggtgactgaagtggacatggtcatagactgcgatgtgtcagcgggtaaggtgttcagaactgtgagtgagaaaggtgggctctgcagggttgaagggacagcagagcagatgctgttttctgaagcaggctgctatgaactaattgtgacccctaaaatctgtatgttccaatctttagccccaaggtgaaggtgtgaggaggaggggcctatgggaggtggtcaggtcatgagggtggagtctcctaatgagatcagtgccctctacaagaggctctgtagatctttttccttcatgtgagaaaatgccatctgcaacccagaagtgtgcctccaccaagaacccaaaaatctactggcatctggattccaacccctggaattgtgaggaagaaattcctattgcttctaagctgccccatccatggtgctttgttatagcactgcgagtggactcaggacagccccaggacagaggaaagatcctgaggtcagcatcaaacacacggagtctgtgttgccttcaaggcatcaggtgaagatatgacaagactgggtgggccctcaactgtctgcactgagcccatccctcacactccaccctgtgccaccctcagatggaacagggaaggagcctggttcgctcaggtgagtaactgggaacttgagttttataagacaggcccgctctgcacaccctgcatggagcggtgaagtaaggacctcacccacgtggggtaggctttggctactgcaccatgcacctctccctgcacatggacacaagtactcattccacaagtagattctacattggcattaactgcatgaatgaatgaacacgagaatgtcaaaaacagcaaaaaatccaacattttaaaaatcattaaaatgtaaactattaaatgaaccccactcaatttataaagtttctgtaaaactaaagtaaagcatgaattagttttgggaagatggtgagtaggaaacaccaggaatctgtctcccacctgacaacactgtgctagtaggatctgtctgatgtaactgatccttgaactctgaagcctaatgaaggcctccgacttctagtggaaggtctggatacaccttgcagtcaatgtcagctttcatcacagtaggagctaccgctactcaccttcagccctgtggcaagcagctgtgcacatgttcctggagcagcctgcacacactggcaggagccagaacaggcaatacagatgttgtcctccaaatattgggaatctgcaatctcactgctgattgctgcttctcatcacagaggtgcaggaaaggaggagggcaccattgtttggccacctcctcattgttgttgctcctccccctctggccaaaatgacttacaggggatttaaaatgctaacacccatttttcccaccttcatttttctctttttccgcttttgggagccagaaattaaagaccagaatattcaaaagtaactgaatatacagggaaaattagaaagtcaccacacatgctcagggaaaggctcagataataccacaagtttacacctcaggctgatccttggcacaaagacagcctacaaaaaatttaaaagaaagataaacaaaaaatagcaaacctatggagagacaatctgatttccagagttagattaaaatttctagttttcaacaaaaaattgcaagaaacaagaaacaaagaaacaagaaactacagcccattcaaaggaaaaaggtaagtcaacaataattgtctctaaaaaaagacctgatggcagatgtactaggcaaagactttaaaacaattgtcataaaaatgcttgaagaacaaaagaaagatgtaaagaaagtcagaaaaattatgtatgaaaaatgaaaatgtcaaagagaaaacctaaaatataaaagaaattctgaagctcaaaatacaatagctgaaattaaaaagttcactagagagattcaaaggcagatttgagcaagaaaaataaagaatcagtgaacttgaagataggacaatggaaattattcagtctaagaaatagaaaaaaagattgaagaaaagtgacaaaaccctaagggacatgtgggataccactaagagaaccagtatatgaattgtgagaggaaattgtgcccaaaagaaaaaaaagagataaaggggcagagaaaatacttgaagaacaatacctgaaaacttcccaagtttgatgaaagacatggatataagcatccaagaagctcagtgaactccaagtaaaattaactcagagacacattttaactaaattgttaaaagacaaggacaaacagagaattctcctcttacatttgaaagcagcaagaaagaagcagttcatcacacaccaggctttccaaataatattatcagcagaaactttgcagaacagaaagcagtgaaccaatatattccaagtgctacaggaaaagaaaaaaaaaacctgtcaaccaagaatcctatatccaacaaaattgcacttcaaaagtgaagaagaaattaagacattcttagataaaccaaagctgagagagtttgttatcactagacctgccttgcaagaaatattccaaggagccctgcaggatgaaatgaaaggacactggacaataactcaaagccatataaaaaattaaaatctcaataaaggcaaatatatggtgaattataaaatatagtattattgtaacagtggtttgtaactccttttagttctctatatgatttaagagactagtacatatcttaaaaacaattactagttaaaactagtattataactttggtttgtaactccacattttgttttctacataatttaagaaacgaataaattttaaacaattattagtttatatcctgggacatacaatgtataaggatgcaattttgtgatatcaatagccaaaaagggtgggtaaatagcataaaggagcataatttttgtatgttattgaagtcaagctagtataaatttaagttagtgttgtaattttcagatgttaaatctaatcctctatgataaatacaaagaaaatagctacataatacgtacaaaaagaagaaaggaatttaggcatttaatttttaaaaatctactaaacacaaaagaagatagtaatgcagaaaatgagtggcaaaaaatccataatgcacatagaaaacaaatattaaaatgacagaagtccctcctcatcattaattactttaaatgtaaatagattaaactctccaatcaaaagacagagattagcaaaatatgatattccacagatcttttaaggactatttctatagtacacaacaagggatatctatttgcattaactataagcataaacatgacagtctttgttttcaagcatgtcaataatgtcttctttttttgtcgcccaggctggagtgcagtggcatgatcgttgctcactgcagcctcaacctttccaggctcaggtgatcctcccacctcagccttcccatttgctgacattacaagttcatgccagcatgccttgctaacttttctattttttgtagagatggggttttgccatgttgcccaggctggtctcaagctcctgggctcaagaaatccaccactttggtctcccaaagtactgaaattataggcatcagccaccacacctggccaatatcttcttttaatataagagatagcactgtgagtgtattattgctacatttttagtttaacgtaaaatttctcattttgactattaaaggaaagtaaaatatttacatcactatttaagaaacctcataatgtacctagcgtgtatagagtactcttaaaactcaacaacaaaaatacaaacaataccatttaaaaatgggcaaaggacttgaatagacattttcctccaaagaaaatatacaaatggccaaaagcacatgaaaagatgctcaacatcactaatcattaggaaaacacaaatcaaaactacaatgtgataccacctcatacctatcaggatggccactgtaagaagaaaaaaacccagaaaatagtaaacgttggcaaagatgtggctaaattggaactcctgtgccttgttggtgagaatgtaacacggtatatcaagtgtggaagagtatggagactcctcaaaaaaatgaaaaatagaattgcactttgatcgagtaactccactccttggtatctacagtagtcccccattagctgcagtttgttttctgtgttttaggtacctgaggtacagtacaagaagatatttgaaagagggagagagagagagagagagacaccatatttacacaacttctattacagtaaattgttataattgttctattttatcactactgttgttaatctcatactctaatttataaattaaactttatcataggtatgtatgtataggaaaagccatagtttatatagggttctgcactatctgaagtttcaagcatccactggggttcctggaatgtctcccccttagataagggggagactactttgcccaaaagaattgaaaacagggtctcaaagagatgttagtgcctcacattcacagccgcattattctcaatcactaaagcatgggggcaactgaagggcctagtgatggacaaatggaggagcaaagcgtggcctgcaccaaaagtagaatattatttagccctgaacaggaagaaattcagacacatgcgacaacagggatgaaccctgaaacatgatggtaactgaaataacctgggcataaaaggacaaattctgtgtgtctacccatgtgaggttcctagaatcctcaaattcagagagacacagagtagagtgaaggctgccaggggctggggtagggtagtgtttaatggggatgaaacttcagttttacaggatgaaaagagctctggggatggacagcggtgatggttgcacaatagcacaaatgttaacgctactgaattctatgcttaaacatgggtaagacagtaaactttatgttatctatatgttaataaaatacaagaaattgggaagatgaaacaaggtgattagtataaaagcaccatgacgtgtggctgctccccacatccaaggcagtgtaccagccttcgtccaatctctatttcagcagaacactccttgtggctcacggagaaagctgagccaagttcctgctggatccctggcaaagctcctttctgctccctgtctccaaggaaagcctgtggcgtgttctttaaagtggatttttcaaggctgcattctgtgtaattttacaattgagaaacaagccattttcctttaaagagtggctgctggaaggggaggggtcccagatgtcctctcttttcctgtacattttggatgtctgctctaacccaggtcagctcctgtcccaaaacatcctccagggccatctgaacagcttgtgaagggcactggtgccagaaaaagtgtcagaatggccagatgttgggccagaagggaggcaacagggaagggagccaggcggggctacaaagacaaactcaggctgcagctggacagagcaatgacccaccacagccggctcagctccaccccggctgagaccagcccaggctgctgggaactccagacttgcatccaaccagcctccctgctccaagccaaaccctcctggcaggcaagtgcgatgcttccagatgagcccttcctttttttcgtgtggctgcaggttccttcctcccggctcctgtgctccccagcagcctgggcttttctctctgcctgggcctggtggtgactgctccaaagggccagcctacctgctcccatcgctgacctgccttgcctcagccccctgcaccccagcctccctgggcctccccatccttggagccattaggaagagggcaggtgcagaagggcaggtggagaaggctaggaccgaccacaccactccaatcagcaaagacagaaactgctgctcttcaggctttccctaaaactccctgtgtgctttgatcagcaccactcagctcatgacttattttaaaaggtctccagtactttcatattttaatcctgcctccccctacaaactgcaaactcattgagggcaggagccacgtgtcatctgagtttgtttcttccaagcctactgccccctgcggagcataagccaacttcccaatcaatgtttgctaccaaattccatgagtctccttttctagcatgtttcaaaccaaggggatggtatgaggacatgggaggggctccaccacgaatcctgggcccagccctctgccctccatgctccaatatggaaaccaacagaagcatccacaagactcctacaacaccctgaacacaacaaggaagtccacaagcccagaatgtgtttgtgaacccgctgcctccacaagccaaggtgtccccagttatacaaagtgtacgggacgtgcagtccactcccttccttcctcagcctggcaagggtgacagtgccggccaggtgggcaggggcatcacggctcctctgtaaagcagaagagtgctggctccattctgtaaagcagacaaacaagacagggctgactgtgctcacaatgatcacgcagccattcctatttcatctctaaagccacagccatcatctgtcattccgaggcctgaacttccttagaaagcagttggacgtcatcctgaaaatgagtgggaggatccagcaggtgcgacgtgctgtgtctgcatgtggcggcttccaccctcaatacctggacactaatattgccgtagaagagaaacaggcatgagaacttttatggggtcagggtcagagctaggagtgcctgtgagggcagtggaaaggactttcaaagctgaagatggcgtctcctctctctagagtctttcagttctgaaggacagtggcaagtttgtgacgtctctaagctcaaccacgttggacaagcctgttcctatggatctactgaatcagccacatgggaggccctaaggcctcggcaagcactcactggagggaggctcagagtaagaagtgacagtgtccctcttccacggtgtcctctcagccccggcacagtgctgggtcttccgtgtggcatccacatcaccccgaaatgagtgcacgggtggacgcatgagcagaaaatgactacgggagtgtcacccctaaaaatcagactagtgaaaagtacgtaggggtcggaaatataaagagtagtaaaaactctgggaagctcctgtgctggacgccacactgaggccccacacagcggtgggatctggcattcagcagacccctgaggaacacactattattggcctcatttaaaagagaaaccgaggctagagaaactaaagtcattgcccaaaattacactactaggaaactcccaggagaaaagctcaaacggaacactttatcattcaggctatgttccaacgtaggtgcccagaaaggtggggtgagcccggggacctgttgcgacctacacttgttcttaacaaaaccgaaggaagcctgcataaaacttctccacgtctcattttggcagccttgttactgcctcttccttgtgggccagatgaaatcaagccaagaacaggacccgccatgaccgaccctcctgctgaccatgctctgtgcttctgcagcttcaccagcccgatctgggacattttactatttactgcaaaacccaccaggagctagggagccaaatgtgaagggaaaatgagtcaactttgatataaactcttttgataagacaatactcaaaaccaatagataaacgaggtttcttgggatcaaccaattattctagttatccctgttcatcattaaaacaaaccatgaaatttattctatttaaatcatcttataaagtagttaaaatgtttccagcccacgggaacctcccccatgcagagaagcaacgcttcgagggtggcaaacagtgggctggggaggtgccctgaccaacgcgtggtgactgacaggcgccacagtatcctacagacaccacggtgaccgacgccatggtgaccgacgccgcagtgaccgacaccatgtctgtctccaccctggatcccctgcacgcccactctcttcctgcaggagtctaatgtcagggtctgggagaaggaggttttgatgctttgtgcacccaaactgaaccttcctcctgcggaccgccatgcagccccggagctcgtgtgccgcacccaggccaacgaccctggaccactgctagtggggctgtccacaccatcgactcttccaggcagaaaatcaatagaggaaaaccactgtattctgacaacttattttttggcataaggatgagactgtactgctcactataaacactttttaaatgccagcagctaactaaagatctaggtacggaaggtctatatagcgtcacctttaaaaagtgtgccaaataggatcgggaagtgcctccagcaggagccgtgaacccgtgctgacccaggcagagctggttctctaatctgattggatctcagatcccgtgccgacccaggcggaacaggctctctaacctgatttgacctcagatcccgtgccgacccaggcggagctggttctctaatctgattcagcctcagatcccgtgccgacccaggcggagctggttctctaatctgattcgacctcagatcccgtgccgacatggaccaccaagttaccatgggacctgagttgcccatcatgaactgaatgttttccgacccaccaagccagaaagttgggtgtacacagcagcattccatcatcaaatggaagtggtatgtgtctgggcctaagtaggccctaaaggcacaagttacataaagaagtgccgccaatgccaacggtccccactcccgctatgctgccttctctctcccagcctgcacctacagtctcctggagagttccctaaaatcagctgacggaggaagacctgggcctggtttacagatggttctgcatgatatgcaggcccccacgttagtggacaactgcagcactactgcccctttctggaacatccttaaaaggacagcggtgaagggaaattctccaatgggcagaactataggctgtacatctggtttactttgcttggaaagagaaatagccaaatgtgtgattattacaaattaataggccatggccaatggtttggccagatgctcagagtcttgaagaaacataatggaaaattggtgacaaagagacttgggaaagaggggtgtggacagacctctctgaatggggagaagacgtgaacaggaagctgcctcccagacgggacaggtgcagagctgggaccttctgcaggagcccagctgccggggcggagggagggcctggtggagtgtccccaagatgcacctgcagagctgctggtcagcctgggccacgctggggctggggtctgtatctcaggaccagtggagtcacagccagattccaacaggagagggtgacggggccagatttggttttgtcgagtcctctttgggttcaacgtgcacggcgggtgagaaagaaagagccgtgatgctggtgcgcaagagagaaggccccgcagtgcggaggcaagaggctcagatggcctggaccagggtgggagaagggaagaggggagaaggggagacagcatggatggagccataggaggggagacagctggccatggagggagccgggtggggcacagagcccactgagctgccgggctggcgagacatggctcaggcccaaccatggccacccccctgcctcaagtgcctcccacggccgcctccctgtctcgagtccctcccagggccacctccctgcctgaagtccctcccagggctgcccccctgtctcgagtccctcccagggccacctccctgcctcaagtccctcccacggccgaccccctgcctcaagtccctcccagggccacctccctgcctcaagtccctcccacagccgccccctgcctcgcgtccctcccacggccacccccctgcctcgcgtacttcccacggccgctcccagcaggatgggctggactgtcggggatgctgaggtttgggagagtttttgtttacttcttcttcctctttttcctgccccacccccatgccactccttctcgccttcttctcttctaatgtacaagcaaccgtgaacatgtttacccatcggggctataaccccacaccacctgaaatcttcttaaatgataataaatccatcatgctacagatattcttttaagaccacaaagcaaagaggagcaagtgacaaggcagggcatgtccgccctcaggaggggcctctacagaggtgaggactgcgctttctgaacaggaagtcacaacacagcgtggaggctgaagaacaaaacagaacccctgaaatctgccctggcgccagaaacacagaatccatcttcagcatcctcagggtttcctttactctaacaaggaaggacgagcaggaagcatcagtccggacctcggctgcaccccgtcctggcaccctgctggttctcgtgatgcgctcttctcgctgaacccctgaggggctcctgagcggtgaggcctcctgggcagccactaggattggaacttcctctccaccacaccagccccggagagcgggcggcggaacttcctctccgccacaccagcccccaggacagcgggcggcggaacttcctctccgccacaccagcccccaggacagcgggcggcggaacttcctctccgccacaccagcccccaggacagcgggcggcggaacttcctctccgccacaccagcccccaggacagcggcggcggaacttcctctccgccacaccatccccggagagcgggcggcggaacttcctctccgccacaccagcccccaggacagcgggcggcggaacttcctctccgccacaccagcccccaggacagcgggcggcggaacttcctctccgccacaccatccccggagagcgggcggcggaacttcctctccgccacaccagcccccaggacagcgggcggcggaacttcctctccgccacaccagcccccaggacagcgggcggcggaacttcctctccgccacaccagcccccaggacagcgggcggcggaacttcctctccgccacaccagcccccggagagcgggcggcggaacttcctctccgccacaccagcccccaggacagcgggcggcggaacttcctctccgccacaccagcccccggagagcgggcggcggaacttcctctccaccacaccagcccccaggacagcgggcggcggaacttcctctccgccacaccagcccccggagagcgggcagtggttcctgagcactcggtgggtttcacatttcacatctcacagtgagccgaggaaggggctgggggaacctgcagggccagggcactcactgagggtggcagatggagagaccgaagcccccacctccttccagacttctggttccaaagttcctctccctggccggcggatccctgccttcactggcctctctgaattccacattccaactgaacccccacagaggtgagcacgcagcagcccctaacggtggcccggtaccatctgccattttgctgcttgccttctccgaggtgcaagaaagttttgtcataagaaacacttgaaggaagaaacatttcagctgcagctgtctcccttgttagcattgagaggcatcggagaggtcaacgccgccccatgccactttttgcacattcttccctcagccggcctccccgcaagactcagggctccaacctctccagcttcccctcgtggaaatccattggctcctcctctttcaagcaacactgtgttcttcccactgctgacagaggctgctcatccgtgcacctgtgccctgcgtcctcctctgcgtgcaccctgcgtcctcctctgcttgcgccctgcatcctctgcacgtggcccgggctctgctccacctgagccccgttcatctctccacagtccaggagccacacactgcggctgccactccagagaccaggaaacccaagcacaggggcgtttgccacattctaggtctcggggctgccgtgggaccctgaccctggatgccggacttccgtgggtcaagggcccaggccaccttctccaacagcactgtggccgccaccccagactcaagcctctgcctcagctcccatgttttcctgactacaggtttcacttccccaaaatccacctcactggctcagcgtggtcgttccgcagaatacatcccaatccagtggggtctggggtaggcagagagaggcatgtgtgtgtgagccgtggtctctgaagctcttgcctctggatttagaaggcaggttcctctttgctgagaggtaaggggctccctcctccctatacctggtgtccgtcctgtgattccttctggaaacctaacatgaaatcattttaaagttgtccttggaggactggggcggctgtcctgcccttcgtccagtcttcaagaatccctctagtttgtaaaaaggataaaaatgtaaatggcaaaggattactgtgtccatcagaaaatgtgagagagaaaatcatgcctggaaaagccgagccctaccatcctcccatctgaacctcagcaccaagagcatgtggatgctgaggtgacaccgagttctaaaccacattcctctcctttctgtgggacaaccaaatgtacaaaagtcccccttttttaaagaatgccatctgtgtcttggaaattaatagctgatctgttaaggtttaagctgaaatctggtgaaaacttgcccaagagaatcacaaattattagtctgataatagggcaaaaacctcaatctccttgcaagaagagaggagacctcacctagtgcatcacaccttgctcaagcagtacaaattgctgacaaaaagctgtgctgtcttcaccagatagcttccaaccagttgaagtcgcaaaggaaaagaaaagaagtcagccaagataacatgatgattttttttttctttaacccactgctcataggaggtaaatattccagtccaaaaggcatggccggcaaacccactacaagaaaataaactcgaatgcaaagaaaagccctagcttttttctactggaaagtcacaagcacagacaggaaatgacccaatgtgataggtctccttccccagaaagtgcgaggctgctgcagacaggggccctcctgtccttccctccagggtgagcccattagcagcaatggcacaggattgtcggctctgaaggttccctagcaaaccacaccggcctcctgctctccgggtgaacacctcggcatccatttggaaagcccttaaaatgaccagatcactggttctctggggcactctcctaccccggggcagggatgggcggccgtccccctgcaagggtggctcaagtccccaggacacctgcagggaaacacacagtgtccacgaacacaacatgggggccttcaggagaaaagagggctccagcacagagtgaggagacacaggcaaccaaacacacacacacacacacaacataccccacaccacacctacaacacacaccacaccatgcaacacactatgtgccacacacaccacatatacaacacactgtgcaccatgcacacacaccacaaatacaatacacaccatgccacacactacacaccacacacaacacataaaccacacagcacaccacacactacacacatacactacacaccacacacatacaacacataccacgccacacactacacaccacaaacagataagccacacagcacaccacacacgacacacaacagacaccccacactacacaccacacactacacaccacacacaacacataaaccacacaggacaccacacactacacacatactgtacaccacgcactacacataacacacaccacacagcacaccacacacaaacaacacacaccacacactacacacaacagacatgcaacacataccacaccatgcagcatactacataccacacaccacatatacaacacactgtgcaccacaacacacagcacacacacacaccatgcaacatactacacaccacacatacaacacacactacacacaacacacatgcaacacataccacatgcaacacacaccacacatcactacattaccacacacacatcacataacacccacaccacacacaaagcagtgtttcctagggagggagacgtccacagcacagggcgtttgaccacccataggaatcggtcatgataatggtctgcgtcacccagtgctgaggcaggcgcctccccttggctctgctggtgcagacacgcagcctcagaacacatcacttagggcctgcctgtgattctccactgggcttgagagcaaagaaatgaacagccatgagaagttcctgactctacaaacaggagagcaagggcacagacagacacgtgggacgcctcctccaagcaaagagcctggaaacgggaaagctcatcctgacttatgtaaagcagtcttgagaaaatggagtccatattttagtgtaagcttcaagtttctgctgcttacaacttacctaaagatacaactaagataatcacctacagctgaaaatcatcttaaattttaatttggctttgatacacactctgcggtttgagctcaagataaaatatttctgcccaattatgatatgcagctaattctccctgatgaaatgtagcatctgcagcacagcgacagcaccagcccgagcactgcgaggctcgcagagcccgcaggacagatgggttctagctgtcatgcagctcccacctccagtgcgaatgatcctcaaaataagaggtacttcttcaccaaggaagaaatacccgaacagacgcacatcatactgatacacatctacccgacacacacactcatatacacacatgcacatatgcacacacttctacccaacacacacactcatacacactcacacacacacgtacatacagatacacatctacccaacacactcatatacacacatgcacatatgcacaaacttctacccaacacacacactcatacacacacacgtacatacagatacacacatctaccccacatacactcatatacacacatgcacatatgcacaaaccaatacacatctaccctacatacacactcatatgcacatatgcacaaaccaatacacatctacctgactcatacacacacacgtacatacagacacacacatctacccaacacacactcatatacacacatgcacatacgcacaaaccaatacacatctacctgacatactcatatacatacatgcacatatgcacaaaccaatactcatctacccaacacacacacatacacacacgtacatacacacacatctacccaacacacacactcatatacacgcatgcatatacgcacaaaccgatacacatctaccgacacacacactcatacacacacatgcatatgcacaaactgacacatctacccaacacacacatatacacaaacacacatatgcagaaatcgacacactacctgacatactcatatacacacacttatacacacacgtacatacagacacctgcccaacacacacacttatacacacacgcacatacacagatacacatctaccaaacacacactcatacgcacatacacacatacacacacaaatacccgaagatgcacatcataccaatacacatctacctgacatacacactcatatacacacacgtacatacacacacacccaacaaacacacatacatacacacgcaaatatgcatagacacaaatacctgaacagatgcacatcataaaaatacacatctaccccacatacacactcatacacatgcacatttgcacaaaccaatacacatctacccgacacacacactcatacacacacgtatatacaaaccaatacacatctacccaacacacacacgaacatacaaactgaaacacatctacctgacacacgcactcatacacacacacttatacacacaaaccaatacacatctacccgacacacacactcatacacacacacgggtacatacaaactgatacacagctacccgacatacacactcatacacacacacgaacatacaaaccaatacacatctacccgacatacacactcatacacacatgcacatacacacaaaccgatacacatctacccgacacacactcatacacacatgcaaatatgcacagatacacacacatctacccaacacactcatacacacacatgcacatacgcacaaaccgatacacatctacccgacatacacactcatacacacacacacaaatacgcaaatacacacatctacccaacacacacacacacaaatacctacaaactgatacacatctacctgacatacacacacatgggcatatacacaaaccaatacacatctacccgacacacatacacacacatgcaaatacgcacagatacacatctacccaacacacacactcacacacatgtaaatatgcatagatacacatctatgacatatacactcatacacacacaaatatgcacaaaccgatacacatctacctgacacacacacacacgcacatatgcacagatacacacacctatccaacacacatacacacacacgtacatacacagatacacatctaccaaacacacacacatatacacacacacgcacagatacacacaacgaaatacccgaacagatgcacatcatacggataacacatctacccgacatacacactcatacacacacacacgcacaaactgatacacatctacccgacatacacactcatacacacacatgcaaataagcacaaaccaatacacatctacccgacatacactcatacacacacatgcaaataagcacaaaccaatacacatctacccgacacacactcatacacacatacatatgcacaaacatatcgacacaacacacactcgtatacacacacgcacgcacatgcacatacagatgcacacacatttacccaacgtacactcatatacacacacatgcatacacagacatctatccaacactcatatagacacatgcatatgcacagatacatgtctacccaacatacacactcatatacacagatgcagatacacatctaccctacacactcatatacacacagatacacacacatctacccaacacacattcatatacatacgcacagatacacatttacccaacatacactatacacacacgcacatacacatctacccaacacacactcatatacacacacatgcgtatgcagatacacacacatctacccaacatacacactcatacacacacacacctacccaacatacactcatatacacacacatacaaacgtgtgggtgtgtgtacatccaggcagacacgtccttctctttgaaacaccaattctatcacttgaagaaaacacaacacttgtacaaagcaaagcatcaaatgtcagattcattaacggggtgacctgagaacgggccagccacttgtgccttgctgggcccgtgatgtctgaattctgagactcgttaagttcagatcgacatgagggcggggaaagaggctcgctgctgtgaagccccttcttccttctgaagggcgcccacgccaggatatttgggccactttggtgcaaaacagataaagcacctggagtccttcctaacaggcaggaggagtccggggtgcagcagtttccagggccgcgtcccatcccgcattcccgcgcgggccgtgctcaggctttgctgtacacttacctgccccgagaccccaccctgcctggccgccgctgaaggtgattctgacccgcagagaggcgcggcctgcaggtgaccagtcaggaccaaaaacccaggaagggatttgcttggtttggttttgtttgatgcccttcagagaacggctctccagctctggagcccagctcagaagcatcaggaggagccactgtccaggcacctggctgccctccgcgcctgagactccagggatgcctgcaccccattattcagttgaagacacttaaaagcgtatgcatccgccacagcaaggaggcgccccacctccagcctgctgggacaagccctccctcggcacacaggagcttagccagggctgctactcactctctgtctgtcacgatgtagccccgcgcctcttcctcggaaggctggacctccaattgcaggccgtcgctgagggcctcctgagcacccgctggaaggctctgctcctccttcgagggcccaggcatctggttttggagctccccaaacgcagcggccccgggctccgaatgcggctgctgccccagcagatctttggaatacgtctggctcttgacgttctccactccggcagtctcctcttctgaagacagggaagactcagggtgctcggacttcttcctctccatgtcgaggggccttgcaaaggggagggctccaggtaagagtcgagacccgtggtcctgcaggaggcccccgagtgtggcactcagacgatggacctgacagagaggacattccgtgagggacgtctgcgaaaggaatgctgatgtgacacatgcaatcaagggctgcccgggacagagtcactgtggggatgacatgggcagcctggaaggagagtgtgggaggaaggcgaagtgtgtgcagtctatatttagaatgatgtctagccgagcatgaggtgtgagggcgctgagtatccgaatcacttacgtgctgttttctcctccctcccgctccctctcacacacatgctcacacacacacctctctgaagaatcagattttgtagagtttgtgtaggtctttggcattgatatttttaaaaataaactgtgtgatatcaagatcccaccccagccctctagaagcaatgaacactaaataataataataataataacaaatttgcaacgactgagctcttccagcacacaaaggcactgtactaaatgcgttatctgcatgaacacactgagtcctcacgtaagcctgtgggtggggcaccctcagtaaccccagttcacagaaggggagacggaggcacaaagcgattaacccacaagtgggcacatcacagggatgtgtaattgattctaacgatacctgagggatctgtggtcctcacacgggctacagtctcccagccggatccccttttcctggacaagccatccctcggaaccccctggcacctctgctgactatgcaccgggtacagatttgctttgtgtgggttctcatgtaattactactccaaccccataaataaagggtgagtttcacctttaatttgtagactctggagtttacagaggttaaatatcaaattattggtaccagatcacaaaagtcgtgattatcagatccagaattggaactcaggtctaagggccatcaaagacatgatctccacccctgggccgcactgccctcccaggcaccctacactgcttcctaggaaagaccgggtctgctcctgccactggcacataccaggcaacccacggacacctcctggtgcatgtgatgccaaaagtcttatgtctacttggcagggtttttttccaaccatgaaattatatcttcaatattatattagatgtaaacaggaaaatctgattcactttacaactcactttgccaaaacacacttttaagaaaattaaggaaggactatagaggcaattattcccattttggctacaaattacaacttttccttttgtattttttaaaatttaaacaaaatagtagtgtgataaaaacactgctcaaatttggatcctcaatgacaataggatgtagccgttgacgttactaaacagagctaggaaaaagcataatattgtcacttaaattgtgtttcatgtgagaagaaaaagaaagatgtttttaaataaataagaagtcagaaaatacaacactcacataccctttttgagaaacagaattgcttgaaaatacaccccaaacaacagagaactgagtcagaattccacgcatggaggatgaaaagcctgtggtctaaaagtcagggagtcttaggctaacggcagccccccagagcgctccctgcccctcaggtgggagggctgggtctccccgactccctaaattaggaaatgtgtttctcagccccacttctccctccacagctcagacagcaggtcccatcatttctgatggatattcaaaaccagaactgctgatgttttcttcctgcacttgccaacaggcatggaaccactaaccagtaagagaatctgaggagagaatgactaaccaaagactcttctttctccacccccaaaactgggtttcccagaaccatgcaatgtcactgctgttgcttagaacggttcttcatccttcggccttgtattcacgaccaaaggttcttaaagggagagaaactaagaggctaaaagacttaacagggaaggccagtgtctagctcgtggacatcgcctgcgactgggcccttcttctgactgcctccggagcagcagtgcccacgggggctctgggatggtggaccgtcctcttcctgtggcatccagcgccttggccctgagccacatgcgactaacgtgccgccgacctgaacccagtgcggccaaggcactgcatctttcatttatttaattttattcaatttaaatataggtttagatggccacatgtggccagaggtgccacacgggacagccaggtgtgagtgagctgaacccctcaggaatccgcacatgcaggaggcatcaaatgtgcaaagtgggcacaggctgccgtgtgataatcctggctgggaaattccaggaaaaattaattttcttctttgcatttaccacgactttcatatttctaccatggataaattaggttataatttgaaaagagatatttcgtatccaaatatacacacttttgtatgttctctttatactgtttttcaatttggagattatgaggggtttctccataattttctgggaaaaaaacttttgtatttcataaatgttcccacaccatgaacaaaaagatcaccaacttccacatttaacatgaaacaaacaccagagacgtcatcttacctcttggtaaagtctatcatcgtcgtcctgcactccgtcatctgtaaaagacaccagtgttaccaagaccctcatcaagaatgtcatcacagggtgccacagacataaaaagggtgaccctgcagacccctccatacgaaaggtgaggtgtgatgacgctggcctaagtcctgccatagagtaaaccttttctgtttatagcacaaaatggcattctgtaaacttcgcgagagcggaggggactgaggagctaaatggtagacgtgaaggcagccacaatgacctcacccagctctgggggtctcacgtgatcgacaaagttaactcacggcaaaaaaaaaccccatcgtaccgagcagttcacgtcatgaaaaagcaaagtgaagccttcgccaaaaccacctcacaattaagatggcttcagaatccactgacttaggttatttcactgtggtcagcgtttctctctaaataggtaccccggctgggcgcggtggctcacgcctgtaatcccagcactttgggaggccaaggtgggcggatcatgaggtcaggagttggagatcagcctggccaacaggcgaaaccccgtctctactaaaaatacaaaaaattagctgggcgtggtagtgcacacctgtaatcccagctacttgggaggctgaggcatgagaatcacttgaacccggcaggcaaagtttgcagtgagccgagatcacgtcaccgcactccagcctgggtgacagagagagactccatctcaaaaaataaaataaaataataaataaattaattaatatcctactttcagtgcccaaaggtgcgtgactcatggcacctgaacagtgcccctggagacagcacgcacaccagggcctcctgcatccctcctagccatggtgcgggtcccgattccttcaaccactgggcgaccacctaacacaggccctcccggggtgcagttccactactcccctgcaccctgcctgtcagccaagtcaggcttccagcttccagcaaggccccctctgcacccgtgcagagagaggggcacgtctgtcatttggttttcagcacgtacttgtggggctgccatgtgtggggagctgagctaggtgctttcttgcagctccacgctgtgagaagccatcaggctgcagaagtcctggctgacccatggggcctccacagggctccggatgcctgccggggtagtggtgctgaggggctgccttctgcttccccagcagcctcagaggaccaatgcacgccccaagcagacatttgaatgatcccctctcactctgctattcaaatatttgacaatattcaccggtacacagtccaaacacaacacttcccatcacgcctgttttcctgactcagcctcagcatggaggagtgaaacctcctcgcagagagcaatttgccattcaacataattgctctggtaggcttagtctgttaagaaagcttttagaggcaaaagttcaaacagataaaaatcattaatacagatccccatctccccagcagaaagcccacattgcacttggtgagccagcagtctctgcacagccctgaggcctcccctccccgcagcacccctgggtgtgggcacccatggcgctgcagtcacctggaaagctgtctccacggagggtggccttggggccatccgcctgttctccagactctcccagggccgctctcccagggctgcctcgagctactccatggtccacgccttgcatcaggccagccatcagctcagccatgccgtccagctccaggccactcaggcccctcacctcagccggctgcctctgcaggtccttcaggagggtatgaatccgtgctcctaggggcacacacacaaacacaaggacgttgtgggtggacgaatgcaaaggtgagggcctccagaccataggggtgtggtgggcgtctgcggcgtcccaaggcagtggccacctagggccaggcgcaggccagtgctcagagaagattgggatattggacttgaatctcaaatccacctgaccctgtaaccatcactagttcagttccccagaggtggaaaacccacagaatggaaggacagactcatccacgcgctcaggaggatggaaagcacagcttccagaaaacactggaatgaccaagccaggaagagagatgggctaggcaacttcaccatgtcctccagaggataaaagaatgggatgagctgtgtccccctcacttggcagaaggagaaacaatgcctggcaaggacagcgccctgcccaggacaccctgcccagcacaccctgcccagcacaccctgcccagcacaccctgcccagcatggaccaactctaattacatctaaacacagccacacagggtcaaagcctcgtccaagaaagtaactgctgccggaaaagccccttaaaggaaggtggcagggtctaggcccccacttcacacaagcagcaacagatgcaggaggaggcagaaaaacagaacccgaaattgagaatagggcagtcgatgattagagcgaggagacaaggccatttgtggagctgccataaccgcggagagatgtgtgcacccgctgctcagcagagtggggaaattaaaacagaatccaacacacattctgtaagtgaagagcacggcgtctgaaatttaaaatttatgtccattacgggtggacataacggaagaaacggtttgtgaatctgaagacagatcatagaagcgatcatcgttggaagaacagaatgggagacgttctgcagaacctcagtcacccctggggcatccaagccgtcggagtcaggagggcacgggggggtgggaaaggaaccagaaacacctgaaagaaagcccacaagtctctcaaatctgggaaggattgtcactcagggactcaagacagtcactaagttccacgataataaaatgcaaggagaaccacgccatgacttcagctgagctactgcaagtcagagatggagaagattcctggaaagcagcgggggcggggcggggggaagacacgctccacacatgagaatggaaagggtcccaggagcgcagaggccgccagacaccctgcatgtcctgtaagaacaacgtatttcatacaatgtgcagagtcaggcatttgacgttacagataatgaatgccacatttgaagggttgaaagaaaaatcattcaatccaggagtttatatccaatgacaatatccttcaaacgagagggtaaaggagagacattttcatatcacgtatgtgaacaaagctgagccagtgggtccctgtgggcctgcacacaggctgaagagaaacaccaccacacagaagcccagagctgcgggaggagccaaaaagctcctgaaagggtaaatatgtggttacataaacaagaaagaccgtcttcttttctcctcttactttatctaaaaaacaactgattgttagcaaggaaaaattattaccactttaaggtagggttcataaaacagctgcaggcatgaactggatggcacaagaggctagagggagctgaagcctcctcaccgcgtccaggaagtggcacagtgacaactccgaggagactgtttcaaaggcgccagggcgtttcaacagagaaaggaaagtcttttccaaaaggacatcttccgtattacccagaaattggactcgtaagtatttacccgagagaagtgaaacccgtaaccatgagagttaaatgagactgtgggtagcagcctgactcctcatagttccacagacagagtctaaagtccatgtgcccggcagcaggagagcggataaggaggccacatccacaccagcactgagccagaaggaaccacagagacgagaagggggacagacctagaaccagtcaggctgagtgagagaagccggtcaccagagaatccacagaatcctgttaacagaagatgaagttcaaggatgggcgaggtctgcccagggcaaccagagccgcatcacctgcaggtggggctggggcaggaggaagcgtcgggtgtgagggtgtgccgtgcagcgtggccgctggttccaggcccacatgcgtccaacgcgtcatcgtgtccacctgcggtctgcgcatctcgccgtgtgtatactccccctcaacagcagcaataaagactctgccctaaagaaggttcatgggcccatttccgagctttgaaggaaaacctgactttcttttgtattcagtgttgaaatctctgtcctcataaaggtttatgtaaaatagctcatggccacgtctctaccttcccgaacgacaccggcagagtgacgcagaggggacacagaatgtcctgacctcagtggggtctcaccacgaccctccactgtaggggggtcccgctgccaccctccacgctagaggggtctcaccacgaccctccaccctagacaggtcccgccgcaaccttctgccctagagggatcccactgcgaccctctgccctagagggatctcggcacaatcctctacaatagaagcggaggaattatttctgctttttacaaattaagaaatgtaggcattttaggttttttgtctgcgtcaaatgcatcaccaggcctgggctgcagcctgcagtgtctgcacagggctcgacagtggcactgcctgtggcacccccgttcactcagccgcacgtcccgtcctctctccacagcgcaggctgtgtctagtccatgccgaggcagcggggccggcacccggtccccacgtgccccgttcactgcatacgcaggacaggagtcagtgtctggggccgcctagactcgcatgactttccaaacacaagtgccgatggcctgtggtgggttctttgagtgaaaattttttaagtgcagtctctcttgcccattaattgaagctggttcttcagggggcgtcttgctacacggctgtaaggacacattttttgaagtgttttgcttcatttctgaacactctctgctgcaccccatcccccaccagggtctcgcatggaaagggtcacagccatgaccctctgattttcccctttgaaaacctgagtcctgtcagcgccactccagacttgctgttgatgactaagaccctctgatgtaaaggcctgaacgtccatgacaggcatttctgagacagcattatgtgtagtttagcatgggatgaagcggacagagtcctttaaagtcaatctgtacacgaaatgtgtgacggacacgggcgttctgatcggagcgtgctgggcgttcactgccaccgatgtcccctgctggggtggccgagtgccccgctctggccgacgttgaggcctctgaattgttcggcagacagtggcggcttctttaccttcgggttgaagtgtccgtattaaccccacatttctgatgctctgacatctggggccctgctgaccctgggggctgcccctcccacgaacagccaattcccagatagtgaacagtcacccactccacgcaggctttccacatgcaaaccctgcgatccggagcccacgcccgcctccgcctctgtgggctcagactccaggccgctgccctagtcaccctggggcaaggaccagacacgggcagcccctggccccggagcggctggaactattcaagctgggcagtcctgtccctgacgaccctgccttgccctcgcccagcctccggactgacgctggcgcatccctgtatcgacccatggcgtggcctgccccctcctctcaaaatctgtaagtaacaaactgttgtttcaacagcagctgtacccagatctctcgggcttgccgtcctaaatcataatgaaacctgccgtttaaaacagaagaagggaaacgcagggattggcatggaggccgcgtactcttctgttttttcattagccttgagccttggaggggagggccagcctcccttcgccacacccccagggcccaccaacccccacacatcagccctcaccatgcattcactgatggaatgctaccttcaaagaaagcttccagcaacaaactcaggaaaatacatctcactttctcacaaacaaaaacatgcctaaaaccgcagcaaagcctgccttcaccgctactcctgtctgcaggtgacaaagggctgaagggctggacagtcccaggtcaacggcacccatgccccagctccttccacgctgacaggctcacgttgtttcacagagaagataaaagatgtgctccggaattaaaggtgcgtgtataccacagccctcggtgctgttttgaaaatgtgctgctcattgcagctttcagaatcagaagagccatctcagcctcgcaaccgagccaccgagccacgagcccagagcaaccttttcattctcattcactgcagtctcctcccaccacagatctttttctttcccagcgattatcatcgcgacagtcttatctcgctcgtccacgtccacaggtccaatgctggcaacaaagggctcactcatcccaaagaaaatggaaataaggaagtgcagggatcgggaggaagagctgtgtctggaaaagtaggcggccacaggcaagagcctgagttctgaagggtcccgggctccaccaggcggagcccagaaaactaacagccccagagaactggcaggaggcaccggagcctgcggcaggaaccggcacagctgcagggagacctgaagggccctcggcattgggcatggctgtccccagcagtcggcgtcctccgtgcttaggaggcgagggatgtctccacacatgcctgcactagccaagatgtgtgtcagagtcggcccggccatagctcacggtggacaccagtccccgtgatggaatttcatcggagggaaagaaacagggaggtgaggaatgagtggtggttgctaaggaaaggtccttcctgtggacacgaaccaatgaacacaggctcggctgcccagcggcctcctcatcaggtgagtggggcaggagggccccagagtaacgacctgaccagaggcctcgtctggggcaaagtccattatttctgatgtcacgattcgcaggaagtggcagggcctccaagtgtggtagaacaattcacttccaagtccaaagatcccttctgccctcccaaaaggacaaaaggactctccacacactagcttggcacagcaggcaccacaaggcctgggagcctccacctgcatctgtagacaccgccttcctgagctcccaggcagcagagtggccaccgtcccccccgcagccggagctccccaggactgcagccccgggccaccacctgcccagacgaccccactgcagctccagagaaggtgacgtggtccgtgcggggacaagtttgggacagagttccattaaccgttcttctgcaaggccctgtgtttcctaagggggctgaaaagctggttgtgatattttgacaaatggtgagagaataaaaatcatgtgacttctcaataaagaaggttaaatgttctcgaattcggcatttccagtgaaaatgaatcatgttttgccatactgatccacaaataaacttttctgagccccccaaggtttataaaaatgatgtgcacaggccagggtattcaattcagagtggctacagtgttgccagcaggaaaatgccaaaagaaagagaaagcagacatcagccggacgcggtggctcacacccgtaatcccagcactttgggaggccaaggtgggcggatttcttgagcctaggagttggagaccagcctgagcaatatagtgaaactccatctctactaaaaataccaaaaattagctgggcatggtgtcaggcgcctgtaatcccagctatgcaggagactaaaccaggagaattgcttgaaccttgggggtggaggttgcagtgagctaagattgtgccactgcactccagcctgggcgatagagcgagagaaggggaaggggaaggggaaggagaagggggacatcagcaggcatcccggggtggagcgctcaccctctccctccagggcaggctggcgcttctcccaccaccccgagggaagaggctgcggtctgtgtttctaacagcaaacaccgtcactgtcaacactgatgagtcctgcttaacacaaagacaggtgtgtcgacccaccctgaactttgcaaaatgatgcttattcccctctcaaacccacacagaggccaagtgcctgctctgaaggaggaactgaacagcaagccacgtctccagaatgccacggctcggcaagacttccctcacatcatcgcaagaaggttccagaataccacggctcggcaagacttccctcacatcatcgcgagaaggttccagaataccacggctcggcaaggtttccctcacatcatcgcgagaaggttccagaataccacggctcggcaaggtttccctcacatcatcgcgagaaggttccagaataccacggctcggcaagacttccctcacatcatcgtgagaaggttccagaataccacagctcggcaaggtttccctcacatcacggtgagaaggttccagaataccacggcttggcaagacttccctcacatcatcgcgagaaggttccagaataccacagcttggcaaggtttccctcacatcacggtgagaaggttccagaataccacggcttggcaagacttccctcacatcatcgtgagaaggggcggcagtgcccggtacagcgtggtacagtgagcgccacactcaaccatatgaacagcctacttgtatcgacagagagcagctgggaatgtagagtttggggaactggcaggcatccacccttgagaaactgaggctccatggtggaccaggaagggaggaagaaatggcaacgtgagcagaaaggccatcaggcacggcgggaaagccagagcaccctggccagacgcggccaggcttggcgtggagctgccagtactgaaccaacaggggctcccctgccgtggctgcagctgcctgcacactttctcaggcctgattattctagaatctgtagggtgttagctcacatttctttttccatcattgcagctaggaccttagacacatttaaagttcccatcaatccgatcatccatccttgtgctgccctgccctgggggatgccaggctggactcccatgaagaaaggctgaccatgctcccggagtcttggccccagcgctcatggtctgtggtttggggcaagctcgctcatttcttcatgcctcagtttccatatctgtaaaatggtgacaagtgaggcatgggcccagcatactgtaagtgcttaataaattataactattatcatgaaacaaggagaggatgagaaatcattttagttttccactcttttccccctttcccatccattctgaaaacaaatacttggttctccatgagaagctctcgccacagctcattgtgatcctcaggtgagaagtgaggaacacagtcagagagccccttagatgctcagtcacacaagctgacaggcaccttccaacttgctcaagatctaattcaagattatgcattttgaaactattttctgccaaaatattaaccaaaatgttaacctatatttaaaaaaatatgaacctctcattaaagtcaaagcccagtctccgtccatccctccacccactaacctacccattgattgcaccaacctgtattgggcatctattgtgatcaaagcctgggaacaaacattattctaagaaataataggctgggcttggtggctcacacctgtaatcccagcactttgggacgctgaggcatgcggatcacgaggtcaggagatcaagaccatcctgactaacatggtgaaaccccatctctactaaaaatacaaaaaattagccaggcgtggtggcgggcgcctgtagtcccagctactcaggagcctgaggcagaagaatggtgtgaacccaggaggcggagctagtagtgagctgagatcgcgccactgcactccagcctgggcgacagagcgagactctgcctcaaaaaaaaaaaaaaagaaagaaaaaagaaacaatagaaaattaaaagcttcattttcttgagggctacaacattgttctcacaccagcacagacacactaaaatgttttggaggccagagagacttgaccaatggatagaacaagcaaacagtttacagggaaaatacaccattaagatcctgtgaagagactgaatgacaccccatctcacgccacgtgtctttccccctcaatgacaccccatctcacgccacgtgtctttccccctcaatgacaccccatctcacgccacgtgtctttccccctcaatgacaccccatctcacgccacgtgtctttccccctcaatgacaccccatctcacgccacgtgtctttccccctcaatgacaccccatctcacgccacgtgtctttccccctcaatgacaccccatctcacgccacgtgtctttccccctcaatgacaccccatctcacgccacgtgtctttccccctcaatgacaccccatctcacgccacgtgtctttccccttcaatgacaccccatctcacgccacgtgtctttccccttcaatgacaccccatctcatgccacgtgtctttccccctcaccgacaccccatctcacgccacgtatctttccccctcaatgacaccccatctcacgccacgtgtctttccccttcaatgacaccccatctcatgccacacgtctttccccctcaatgacaccccatctcacaccacgtgtctttccccctcactgacaccccatctcacgccacaggtctttccccctcactgacaccccatctcacgccacgtgtcattccccctcactgacaccccatctcacgccacgtgtctttccccctcaatgacaccccatctcacgccacgtgtctttccccctcaatgacaccccatctcatgccacgtgtctttccccctcactgacaccccatctcacgccacacgtctttccccctcactgacaccccatctcacgccacgtgtctttccccctcaatgacaccccacctcacgccacgtgttattccccctcactgacaccccatttcacgccacacgtctttccccctcaatgacaccccatctcacgccacgtgtctttccccttcaatgacaccccatctcacgccacgtgtctttccccctcactgacaccccatctcacgccacgtgtctttccccctcaatgacaccccatctcacgccaggtgtctttccccctcaatgacacaccatctcacgccacgtgtctttccccctcaatgacaccccatctcacgccacgtgtctttccccctcaatgacaccccatctcacgccacgtgtctttccccctcaatgacaccccatgtcacgccacgtgtctttccccctcaatgacaccccatctcacgccacgtgtctttccccctcaatgacaccccatctcacgccacgtgtctttccccctcaatgacaccccatctcacgccacgtgtctttccccctcaatgacaccccatctcacgccacgtgtctttccccctcaatgacaccccatctcacgccacgtgtctttccccctcaatgacaccccatctcacgccacgtgtctttccccctcactgacaccccatctcacgccacgtgtctttccccctcaatgacaccccatctcacgccacgtgtctttccccttcaatgacaccccatctcatgccacacgtctttccccctcaatgacaccccatctcacgccacgtgtctttccccctcactgacaccccatctcacgccacaggtctttccccctcactgacaccccatctcacgccacatgtctttccccctcactgacaccccatctcacgccacgtgtctttccccctcactgacaccccatctcacgccacgtgtctttccccctcaatgacaccccatctcacgccacatgcctttccccctcaatgacaccccatctcacgccacgtgtctttccccttcaatgacaccccatctcacgccacgtgtctttccccctcaatgacaccccatctcacgccacgtgtctttccccctcaatgacaccccatctcacgccacgtgtctttccccctcaaggacaccccatctcacgccacgtgtctttccccctcaatgacaccccatctcacgccacgtgtctttccccctcaatgacaccccatctcacgccacgtgtctttccccttcaatgacaccccatctcacgccacacatctttccccctcaatgacatcccatctcacgccacgtgtctttccctctcactgacaccccatctcatgccacgtgtcattccccctcactgacaccccatctcacgccacacgtctttccccctcaatgacaccccatctcacgccacgtgtctttccccctcagtgacaccccatctcacgccacacgtctttcctcctcaagtgcacgagtgtctgggctgacctgctctccaagctggcaccaattatagtacagggaacccaatttccaaccaaaagacctccaaacttttataaagcaatgtcatcaatgtgtaaatcactgcctatatttaacccctggaaattaacaactacattgacataaacttaaatctaaccagtgtcttttcagtataaactcttaaaacataaaatgtataagatgttaccttttctcaagaggtaaaaaaaaaaaaaaatccttatttttaatctctaacaaaggcaatccaattaactcactgatttttaaaaagataagcccggctgggcgcagtggctcatgcctgtaatcccagcactttggggtccgaggtgggtggatcacctgaggtcaggagttcgagaccagcctggccaacatggtggaaaccccatctctactaaaaatacaaaaatgacccaggcgtggtggcgcatgcctgtagtcccagctactcaggaggctaaggcaggagaattgcttgaacatgggagacggaggttgcggtgagctgagattgtgccattgcactccagcctgagtgacagagcaagagtccatctcaaaaaaaaaaaaaagataaacccaagtgatgtctcttgaaaaaacaaaaaaattactgtggaatttttgggatctaagttatgctgaacaaaaagtggcaagaatatattttaaatttaatataaaataaataaaacatatgaaaaataaaaatagaaagtaagcaacacaattctttgctgtttgttaagcctcattacagacacatcagatttaggtggcgtagtgtggcatcaagggcatgaatgataagaaaacagagtcatctgagggaagaggccgtggggcagaaggctgccgtgggtgttctgctgagctctgaagcttggccggcaacaatgctgttccctgcaggctcctgttgcctcaagcggggcagtgtgtgtgagacccaccttcatgcttcaggaacactggccaaggcagaaaaatagatggatgtattcatgagagatttttaaacaagttgaatccaggctgtttctgctaaaggctaacgtaaccagaacattcagctgacaagcatgttccatttctgagtacctgggctcaccaagggtgtaccccagtctccgccctccacatgcagggctgagatgtccaccctcagcagctcgaaaagtggcagctctgccgccctgacctggcactgacgcagcaggcggatgttcctgtgtcccctgcactgaccttcactgcaaagctaacccaggtgagtcccagtattcaccagctcctggagcccagaaacaagtgggcatttctagaaggtcaaggagcatctatatggaaagaccttttctccttaagatctcggtgtcatctcctgcccctctaattccacccttgtgaacataacccaggggggtcactgaggtgagatctgtcatgcagagggaagaatgtgggtgatcatggtgatctgcaaagctctcttctttcctggtctgtgagacgctgcgtatctgcagcaccgcgacccagcactcctctccctccgtgtcctgtgaactctcccatgatggttgcaccccagccactctggcctcctttctgttcttccaacccaacgtgctggtggaattatcctactggtttgcagcaaatgggccccacacaacaccgagaagctgggaaatattattctgtgcatcccaccctgcttacagcaatgtctgttcctctcagcacctcatgctgcctcctatgcgggaagccaggccctgtcactgtcctgcccctgcctgcccacactgcccgcctttccactcttgcccctgcctgcccaaaccgcccgcctttctgctcctacccctgcccacaccgcccgcctttctattcctgcctctccctgcccacaccgcccgcctttctgctcctgcctctccctgcccacaccacccaccttctattcctgcctctccctgcccacactgctcacctttctattcctgcctctccctgcccacaccgcccgcctttctgctcctgcctctccctgcccacaccgcccaccttctattcctgcctctccctgcccacaccgcccgcctttctgctcctgcctctccctgcccacaccgcccgcctttctattcctgcctctccctgcccacaccgcccgcctttctattcctgcctctccctgcccacaccacccgcctttctattcctgcctctccctgcccacaccgcccgcctttctgctcctcaccgcacgtcctactccaggcgatctgcaggcagcctcttactctgcctgtggtggggtggtggtggtgggtggtatgagccacgccctccccttcagggacagatgagagcttcaggaggtgaaatactcccccgccccctccttcttccctcttgtttcctttcccttctttcttccttctccccaatcttcctccctccctcccttgctagctgcattctttccttccttcctgccacaaatatttactgcacatctcctttgcaccagctacctttgaaggcgcagagataaatccatgagcaaagtccttgcttttgtgtgacttccatctatgttagaaggaacaggaaacaaataaaaaccatgaatgcggccgggcgcggtggctcacgcctgtaatcccagcactttgggaggccgaggcgggtggatcacaaggtcaggagatcaagaccatcctggctaacatggtgaaaccccgtctctactaaaaatacaaaaaaattagccgggcgtggtggcagacgcctgtagtcccagctactcaggaggctgaggcaggagaatggtgtgaacccgggaggcggagcttgcagtgagccgagatcacgccactgcactccagcctgggtgaaagagtgagactctgtctcaaaaaaaaaaaaaaaaaaccatgaatgcacagaatatgtggtggtgattgatgctgcgaagaaataacccagagtatgaaggatcgggggctggagcactgctctttcataccgcactgccagagaaagcctcattgagaaggtgaagtttcagcagaggcctgagggaggtgagcatgggcctagtggggcctgggaagctgtcttcaggcaggagtagcagtgagcactaaggccgtgggcagaagctgcctggcgtgttgggttggaagaacagacaggaggccaaagtgtccagaatgcagccccacgtggagagttcacagtgatatgggagtgctgggaaggggagagctggtccctttaaatgatatagaagtgtgaagggaagtgctgggttgaggaaggcaggtccctggctggggctccatctccacagacctaggtgaggacaggcactcctgccttcaccaccaaatgctgcatttcccaagaccaccctggcccctaccacactcccatcctgtgcctataaaaacccccaagaccctggcaggcacacacacaagtggctggatgtcaagaggagcacgttggcaaaagagcagaccaacagacaccagcatgccagcaggccaccgactggtgggacaagagcagaccgacagacaccagcacgccagcaggccaccaaccagtgggacaagagcagaccaacagacaccagcacgccagcaggccaccgactgatgggataagagcagactgacagacaccagcacgccagcaggccaccaaccagtgggacaagagcagaccgacagacaccagcatgccagcaggccaccgactggggggacaagagcagaccgacagacaccagcacgccagcaggccaccgactggggggacaagagcagaccgacagacaccagcataccatcgaccagcggaacgatgccgagtgtggccggggcagtctgaggagagcccaggccatcaagcattcggactccaggggaaaatcatctcccttctggctcccccatctgctgagagctacttctactcaaaacaaccttgcacttactctccaagcccacatatgatctgattcttccagtacactaaggcaagaacccagcattcagaaagccctctgtccttgtgataaggaaggggtctgattgagctgactaacacaagccacctatagacggcaaaattaaaggagcgaaaccaaaagagcaccctgtaacacatgcccactggggctttaggagctgtaaacattcacccctagacactgccatggggtctgagcccacagcccacccgtctgtcagctcccctagaggtttgagcagcggggcactgaagaagcgagccactcccccatcgcacgccctgtgaggggaataagggaacttttcccgtttcaacaggacacggagggagaggagtggtgggtgggggtgccacagatatgcagggtcttgcagaccaggcaaacagctttgatttttactgagtgtgatgagaagcccgtggtgtgctctgagcagtgggatatcatctgattgacaaatttacaagaaccactctgcaggcctgagacaaggtcagaggcaggaggccaggtctggtcagatctggttaggggtggtggtcggggggacagagagcagccggctggtggggaggagggggcaccctgggtgtgctcgctcggaaggcaggtacagcagggtctgccaacagactggacatggggggacagaaagaaaaggacctaaatggatagtggccccacagccatgctgtaggaaccatgggagggttcgttcaaggtgtggggtccgggctgggctgggaggccctcaggagcccggcaggcacccacactgccatgtttggtcttgtgccagtgcaggtgggatgagagtcctgctggtcacaggcagggaatgtcagggcagaaaccctaaaagattcactgccttccagaaaaggcagcgtaacgcagagacaggtgttctccggagtcagccaaaccgggctcaaactccaccccaccattcaccacagttgggactcggggaaacccatccagcctcttccagcctcatgagccctctgtgtgaaactgaatcaataactcccactcgaatgggttgctgagaaaatgaaatatagtaagtgtgttgtctactacctgctaatgctcagtatttgttgacaggaagttgtgtcccctcttctaacaccgctgtaacatttaacaactcagaaaaactctctcttatggctgctacgcatcccttttcctttgactccctttggttcgagtcttgttaaatggatgggagagcagaaatacaactgccctgaaataaaacttcatgttctttatggtaaagatcagagaacaggaggcattttcagtgggcctcttagaatcactataataggaaacatccaccttcaaaatggaataataaagtacaattccaaaaactacttcccctcatctgaaaaagaaactttttaggttatcattaatgaaaaataactttaaaaaaaatcataagtatataagagaaaattctaagttgctgggcagcttatgggagaacagttaatgcatactagggatcccctcccatgtaacctctacaaaccacacacacagcattttatgaacatgctgagttatctcagaagcatccactacctgccatttgaagatgaagagaaatgaggaagtatgttttgcagcatccagtgagccctggtgggttgaagaagggcggcagcacagagcacagataacaagaatatcaaagtaaaacgttgtgttccatcaactgcaccacgtaattctgcaatctggccagttcataatgacattttaagtagctttcagtgctccaactgggctctcataaggcaattacacaaaatgtcaggatattaaatgtgtaaagcctggagtaagagatcagctcacatgactctgcattctcaactgccacagccaggcctattgaaattatatgtcattgtagggccttccaaacaaaatggtacaagctttaaacaatcagcaacagcctgcagataacctcgccacaacattgttttcacaaagacaatgggaatcatgcacaacagcttttgctcctaagtgcctttacaaccatgtatatatgaaggtacacagttagccacatctgaacacccatcatcaccatcagtagcaccaccatcaccaacaccatcatcaccatcatcatcaccatcaccatcatcatcaccatcaccatcatcaccaatgccatcatcaccatcaccatcagcactatcatcaccatcaacaccatcatcatcattgccatcatcaccatcaccatcatcaccatcatcatcaccatcaccatcaacactatcatcaccatcatcaccaccgtcatcattgccatcatcaccatcaccagtgccatcatcaccatcaccatcagcactatcatcaccgtcaacaccatcatcaccatcaccatcatcaccatcatcaccatcaccatcatcatcaccatcaacactatcattaccatcatcaacaccatcatcatcaccaccatcatcaccatcacccaccatcatggggaatggactgtgctcctttggtttagaggacatacagcccatttaattgctggggtccaaaacttgggtatttgcagaggattcaggtaaattcagtaggagctcattatcgcattctctcctcatttgggcttccacagggagaaactgacataatcatatgccagcatgttgtctattttcactggaaacaacacaagtgtagtaaaatatattctgcttccaatatgagggggtaaggaatcacagctgagtagtgtgcatctctccctgactaatgaaaagtgcccatgctgcagcctgggatgaagcttctcctgcactgtcatgccgcaatattttgcactcacagggctcagcattcacccagtctgacactttctctattgaatgcaatactgaggcaaagaagaaaaaaatatatccaattagctctggcattaatgacatgacttcagtggggtgtggggattggcagtcaaatggctttctaaagactgcttcctttaggttcatgttagtgtgagtttgcacactcagaacgtgaactgacggacgacaggtaacgcagctcaccgtggactgggtggcaggtaagaccagaagagaaaatgttttacagatgtcagagggttgggacttcggagctgcccacattcgctaaatgagctaagccgacatctgcagaaacgccctcgtaatgggaacagttacctcgaaaagttctagaaatgccggtggagagggcaggtgaacacacagctgcagtcagacgctcggcatgatcagacccaaagcaaaccaactgctgcatagaacgccctggggcttcgagcccccagttccagcctgtgacgcactcacccgtgggaaggggaaaggctcccccagtgccttccctacacctgccctgtgccctcagagcggaagcatcaccatgtaatcagcggtctccattaaccaccagcgttcaggttggaactggggagatttggaaaagtgacaggaaggatgacatcatatgcagaggatgcttatacagcggagagcacccctgttccatgtggctctggaaggcctccccattgtgctaacacagcggacagcacccctgtaccatgtggctctggaaggcctccccattgtgctaacacagtggagagcacccctgttccatgtggctctgaaaggcctacccattgtgcttacacagcggacagcacccccgttccatgtagctctggaaggcctccccattgtgcttacacagcggacagcacgcctgttccatgtggctctggaaggcctccccattgtgctaacacagcagagagcacccctgttccatgtggctctggaaggcctcccccttggagccatggcagaaggtggtgggaggaaaacctcaggggttgggcagtgacagtgaggtgcctttaggtgccctgccaattcctagtcagacagaggcaaatttcaacccaattctcaaagtaaaaatctttccagcaaatgcagctggcttacagcagcatggacctggcaggaaagcagtgacctcagaggtgtttaagcagagtctgtaaggacatcagccaaacaccggggaagagatttctcacatgggggcagtttatgactcttacttctcccaaatctgaaagcagtgactctgcactagtgcagaagtcggggagcctcctccccctgggagaagacatgagctgggtggagccgagcagtgcaggtccgggactgccagccacacgcaggtccgaggctgccagccacacacggccgctgccaccccgcactgggcgcatccacgtcagggttgctgagcaggtgggtgtgtcctcaaggtgcagtgagacgaaccctgttcccgctatataagccacagagtgacccccccagcaccccgggtgccctctcctgcgcctgctcccctgggagagagtgcgctgctgctgactccacggtgtgctgacacacaggaagaaaggcctcaggcagtgcacactgagcccgggactgtttcgctaggatgaaaggcactttgataacataggtgccttctcctcctgctttagagggtgctcgtgaactccagccaggggcatggatccgagattaacaatttatcagtggcttcctcctggagcagcctgtgagaggcggcctctgtgtgccagtgattaggtggccaattctcttctaattttttttttttaagccaagaggcgtgcttgggtttagagcactgagcagcactgggatgcattcaaatatgaatgaatttcttcaaaaacgaaaaggcagcaggtgcttcctttcaagtgaaaatgaccccaaaagtgtgggcatattttctccaaagtgacagaagcattggtatcagttatttctgtgttataatctactgctgtcaccgtgaaaagtcaaagctttggttcagtgccctcctgagactgggctgcggggaacacgcccttctctgtgagggttttcaggctgggattcccaccaccaacacgacaaggaagtgggcaccccaccagccaacgcaggacctcagggtcacggaaggctcgaaggagaagaggaccagaacacgcttattttggatgaggggagagaactgggagcggagcccatgtgattggccaggacttcgcaagtgctttctgagtgaatgagtgaactcaggagaatcaggagcccgtgtgattggccgggacttcgcaagtgctttctgaatgaatgagtgaactcgggagaatcaggagcccgtgtgattggccgggacttcgcaagtgctttctgaatgaatgagtgaactcgggagaatcaggagcccgtgtgattggccgggacttcgcaagggctttctgaatgaatgagtgaactcggaagaatcaggagcccgtgtgattggccgggacttcgcaagtgcttcctgaatgaatgagtgaacgcgggagaatcaggagcccgtgtgattggccgggacttcgcaagggctttctgaatgaatgagtgaactcgggagaatcaggagcccgtgtgattggccgggacttcgcaagggcttcctgaatgaatgagtgaactcgggagaatcaggagcccgtgtgattggccgggacttcgcaagggcttcctgaatgaatgagtgaactcgggagaatcaggagcccgtgtgattggccgggacttcgcaagggcttcctgaatgaatgagtgaacgcgggagaatcaggagcccgtgtgattggccaggactttgcaagtgctttctgaatgaatgagtgaacttgggagaatcaggagcccgtgtgattggccgggactttgcaagtgctttctgaatgaatgagtgaacttgggaataaccacgcgaagcgttgcatggctggagagttgcacggccggcagcagaaacaagttcttccagcttccacatgagtttccgagtgcacttcccacatgaacaccacgggccccatcttaggacagaggctggctgggtggagacccgtgattaccttggccatacaagcgatagtataataagacacctgaatagaagaaatatcaggtatgttgggatgaggttgcaatgtgaaattcagaaccaaaagtcagtcgtcatgatgtgaattagggacttgtaattcccatccaggctctggagggcgcagaaccaagatgatgaaagaaagggttctaacaggttggttaccggttttgtttcccgttcagtgtggctggtgtttgatcaatgagcaaggattacaacagtggacaccccacacattatttgtcattggttcatttagaaaacggtgtctgatgcatctcctaaagtgatttccaaaacgctttcgctgtcatcagagtcttgagctgaaagtatggcattacacaagtaccgtatctatatgaaaaaaaactacagcactgatgaaagaaagcaaaagtaaagaaatggagaagcagcgtataaatattacatgctcatggctagcaggacatgggtttggatcataatctcaaaagatacagtcccaattgccataatcccaaatagtgaaatccccaaatatctgaatatcaaaatctctaaatagagtctaaatcccaaaagtctagtgttgctaatgtttaaaatcccctaaatcataaccacaggagagttgcatcctgctgggtggagctattagcttgttattgtctttatttggaaattaagcataacttaaggagttgtgtgtgagtgccaagttgacaaggggtgaaactgtagacttcgttttaagtgtcaacttgactgggttaaggaatacctagaaatccagtaaagcttcattttgggtgtttctgggaggtgtctccagggagattggggtggagtctgagagggctgggggaaggtctgcctcagtgttggtgggcgggcactgtccaaacagctggggcccagagagaacaaacacagagggtgaattaggctccctctgagtgctggggcagactttccttctgctgccctggacatcagagctccaggtttggcggcctttggactccaggactcacaccagccgtccctgggtcttcagactgagagttacatcatcagcttccctggttctcaatgcaaaaacactgcaacttcctcaataaatgaagaatgtcctttttgtacatctgcatttgcgaaagatacaatttcttgagatctcagctcttcgactgtttatgcagcagtgacccatcagggtttttgactcatcttgtcaaaagccttaggttgttcatcagggtatttcagatgcctgcagttatacagctgggtgcacacaattaccaagcagagggacatgcttttatacatctcccttcctgacctatgtcttcataaacacagttcatctgctcataagtgtgatgcccatgcaactgtcgtcaagatatctgagggcttatgtctgcaaaaatacgaatgttattattgcttattttattgtgtaaaatggcctatgaagtgttttgtcacgattttatatattttgcaaataaattcccttttaaaaatgtaaataaatgtcttttaaataattttttccagaattacatttttgggattttgatattttgagactgtgattttcaggattttagggaccttagggattttgatatttcaggatcttaacattcagaactatggcattcaggattgtgtctttcaggattatgactggctcccaaagactcaatattgtcagcatgtcagttctccaacttgatctatggatttaatgaaatcccagtcaaaatcccagcaagtcattttttggatacaagcaagtttattctaaagtttatatgtagaggcgagtgacccataacagccaacacaatactgaagaagaacaaaggcggaggacaacagcacccatcattaggatgcactacacccattgttacgactcactccaactccacaggaatccaggcagggtggggttgatgacacagacaaacagatcaatgaaacagaacagagagcccagacatgggtccacatacatgaggtcagccgagctttgaaaaggagcaaaggtgatgctatggagaaaggatcgcctcttaacaaatggtgctggacaactggatgtccacatgtacagaaacaattccagatgcagaccttacacctttcacaactaactcagaatgggtcacagacctcattataaaatgaaaaaccataaaactccttaaaggtaagagaggagaaactctggatgaccttgggtttggtgatgactttttaaaatccaacaccaaaggcaaaatccatgaataaaataattggtaagctggacttcattaaaataaaaactaatgctctgcaaaagacgctgtcaagagaatgaaaatacaagccacagactggagaaaatgtttacaaaagacatatctgatatctgataaaggaccaatatctaaaatattcaagaactttacaaactcaacaataagaaaacaaacagcctaattaaaacatggcccagagaccaccacagacacctcaccacagaagatacacagatgaaaacaagcatgtgaagatgctctgcttcctccatcatcagggaaatgtgaatgaaaatgacaacgagacaccaccacacacctctcagaagggccggaacccagaacattgacaacacccaatgcaggcgaggatgtggagcaacagcagctcattcaccactggtggcacgcagaatgcagaatgccacagccactggggaagacagtttggtggctgcttccaaaaccaaacattctcttactatgtgatccagtgattacactccttggtacttaaccagtagaagttaaagacttatatccacacaaaaacctgcatgagggtgcttatggcagctttatgaataattgccaatacatggaagcaaccaagatgttcctcagtaggcgaataaactgtggcccatctatacaatggagtgttatggattataatgtaataatacaatactattcagcactaaagagaaatgagccatcgagccatgaaaagatgggggaatcttcaaggcatgtgacccatctgaaaaggccacatattgtaaggttccaactccaggacattcaggaaaaggcaaactatggagacagcaacaaggtccatggttgccaggtctcgagtggggaaactggagacgctgaactagatgagccccaaattccttcaccggccactgcacgtcacctgttgtcctccccgtcaccccaccttagataggccttccactgaacctgctttaaagctctttgaaaggagaccagatgtgaattatgaataagtgaaggaagagagtctctttttaaagcttttaccaggtaaacttttgtcatatgcgttcagcccgcagcctcgttgactgactgcttctttgggagcaggtacgcgtgggtcttctctcccactctctgaagactaaacagcaagggtctcatgttggacccgaccgtgcgacaggagggtggccctgttctctgacctgtaaagaagttttctgttccctggcattatcacagggtcctcccttcctgctcgggtgcagttgctctttgtgtgttgagaatgtctgtctagctagggcctcacatcttcagaaatcattcgatgtctggatttgctttagaatcatcccagggcagagcagggggctgtagtgggcgcagaggagcatcaggaaagcctgagagtcaccacttgtgggagacaggtgatgcctgtacggggttctcaatattctctgtatatttcataggtgatgcctataccaggttctcaattctctctatttcttaggtgacgcctgtacggggttctcaatattctctgtgtgtttcataggtgatacctgcacggggttctcaattctctctatttcataggtgacgcctgtacggggttctcaatattctctgcgtgtttcataggtgatgcctgcacggggttctcaatattctctgcgtgtttcataggtgacgcctgtaccgggttctcaatattctctgcgtgttttgtaggtgatacctgtacggggttctcaattctctcttcttatttcataggtgatcaatattctctgtgtatttcataggtgacgcctgtacggggttctcaatattctctgtatatttcataggtggcgcctgtacggggttctcaatattctctgtatatttcttaggtgacgcccgtatgaagttctcaattctctctgcttatttcataggtgatcaatattctctgtgtatttcataggtgatgcctgtaccgggttctcaattctatttcataggtgacgcctgtacggggttctcaattctatttcataggtgacgcctgtacggggttctcaatattctctgtatatttcgtaggtgacgcctgtacggggttctcaattctctctgcatatttcataggtgatcagtattctctgtgtatttcataggtgatacctgcatggggttctcaattctctctgcgtatttcctatttgccgttttacatgaggcttttctaaagcgcacagtgcagtttggaagtcagtttttatcagaatatcaccagcatcgcagggtagctcaggaagaatgccaagcacattgtgtaactcgtagggatcacgggagagtggagagagcacggtcaggacgcttgttccgaagatccacaccctggggtgtgggaggaacgagaaggcgccaaggcagggaggtgaagctccccggtgcataagaaaggcacacagaacaggagcgcgcaggaagggctcgcagagcaggagcgcacgcgtaggaagagcacgcagagcaagagcgcgtgcgtaggaagggcacgcagagcaggagcgcgtgcgtaagaagggcacgcagagcaggagtggcgcgtaagaagggcacgcagagcaggagggtgcgtaggaaggacacgcagagcaggagcgcgcgcgtaggaagggctcgcagagcaggagggtgcgtaggaaggacacgcagagcaggagcgcgcgcgtaggaagggctcgcagagcgggagcgcgcgcgtagggagggctcagagcgggagcgcgcacgtagggaaggcgcgcacgtagggaaggcacgcagagcaggaatgcgtcctattctctctgtgagctcaccctcacccggctctccagctgggtttccctccctctgatgggggcgacgatgtttattgctttctgttcccaataatgaggacagaggtgaatggggctttttaagctgtgggagatgggataggagagagaaaagggaggttagagaaggaagaggacgacccaaagtgaccccactagaaggagtatagaggtgggagaatgcaggtagaggggcagccggtgccggggaggggcaaggaaggctgagatgagaagctgaaggtcacctcagccatgtattcaccgcctgtggccaagggctgaggccacactgagctggaggagaacaggaagctcggcagctacacggacccaaggtcgcaagtgaagaccccctgatagcgtccaggacctacgagagtgcaggaggcagtgaagacccccgatggtgtctagtacccacaagaggcagtgaagacccctgatagcattcagtacccacgaaagcgcaggaggcagtgaagacccctgatggtgtctagtacacaaagagtgcaggaggcagtgaagacccccgatggtgtctagtacccacgaaagtgcaggaggcagtgaagaccctgatggtgtctagtacccacgcaagtgcaggaggcaggaccatcaaggaaaggggtttctcggagtagagcatggcttagaacagaggagacgtcgtcccagagggagaggtgctggagggaaagtggccactccaggcgggcagctcccgtagcaaacagcaccatcaatgctccagcagcactcactcaagtgcagcatcggcctcctccgccgtccttctcctccaagagaggaacaaggagaaagcatcggtaatggtcacacgtccttccctctaattgcaatttcacattccttctatttaaaaactgccataacggctgcatgaacaaagaaagagcgagggcaggagagctcccggctgcagacagcagagaagctgatgctcgctctcagcggctcccattcagccttcacttaaggagcagagagtgctcacataacgcgatgctcaggcaatgtttgtgaaattttagtatttgttatctccaaaagggaagtcatgttttatcagaacccactgcaggatggtcttgggaaaaggctgttgggaaataaatgggtcggaaccttctccatatcacaaagagtcgcaggaacccgcaaacgcctttctcccctgggcccgccctgacgtggcttaactcaggtagcgacaccggaagccacggtcttggcagagcagtcacctcgaggccgacactgttcagctagtgcatggtgagcagcatgaaatccagacagggggcttcggaggatgtggcaaaccgccataaatatgggctacggtcacatgctgggccacagggagaggtgagttcagcgacaaaggacactggacttaacgtgttcagagtcaattttccaaaacagatatggatgacacaagctgtgggccagacccgtcctgcaagccatgttgcccgccccatccatcagcttcagcagtagaattgtgaaatcataaaatctggggaagggatgaacaagaagtgagaagggaacacacactgtcctcacaccctcaggatcatctcctcctccccctggctgccgcgttccctgtcctcacaccctcaggatcatctcctcctcccccccggccgccgcgttccctgtcctcacaccctcaggatcatctcctcctcccactggccgccgcgttccctgtcctcacaccctcaggatcatctcctcctccccccgggtgccgcgttccctgtcctcacaccctcaggatcacctcccctcccactggccactgtgttcactgtcctcacaccctcaggatcatctcctcctccccccggccgccgcgttccctgtcctcacaccctcaggatcatctcctcctccccctggccgccgcgttccctgtcctcacaccctcaggatcacctcccctcccactggccgctgtgttcactgtcctcacaccctcagcagcgccttctccatcccactgtcaggatcacctcccgcctctcactggccactgcgttcccaggacgtgaaatgaccacatactccttcccagcacagagagggtatgagggccgaagggacccttccctacatggtgccccattcctgccacgcgtcctcgggggagtgcggtgtgcagaccccacgtgtgggaagagcatggtgcgtctgtcactgggaggggctggacagaggacagtcagcaaacaagaaacaccaagcggggctggctcaccatcgcctgtgctggaggggtcttcggaatctcccagaggtgaaggccacttctggggggcggctggtgccagcaaaggcctgggcattcttgagggtgcacgcagaaggtactgtggctccaggctgccctccccggggggagctgggggcctctgggcagcataggcactgagggccgccatcagatggtgtctgtccacaccactgtccaccttagggctgagctcatctggctggagctggccgagggtccgcggcaggaggtcctcgcggagctgggtccgggacccgggagggtaggtcagcgcagacgtgtgggccacataggtcaggatgctctcggagaagcggtcatcaccctgaaggaaaggagagcaaaacagagcaagagtcacatttccatcgtcagctgggggcaccaagatgcccttcagtctcagttttcaaggtcctaaacagccctgggggtacaaagatgcccttcggtctcaggttcaaggtcctaaacagccctggacatctctgaaatgtaaagccaaaacaggactctcattttcacactgaccaacccaggtccctatttcatatttgttcctgcattatttttaatatcagctttatggagataattcacccacatcagcagtttttagtgtattcagagttgtgagacatcactactaagtccagaacatccgcatcacccaaaaagagactttgcagtgttcccattcctccctcccaccctgacactgctcattcgctttcagtctctatggaggagtctcttctggacgtttggtgtaaatggaatcacaccatgtgtggcatctgtgcctggctcatttccctaagcataatgtcctcaggtgcacccatgctgatgctggggcatgggccaggacatccttcctctttcagccaagtactatcccactgcatgtatatcccacattttaaaaattcacctatcagttgatggacatttgcttttttctaccttttggctattttgaataatgctgctatgagtattcatttatgagtctgtgtatcaatgtgttttcaattctcttgggtttattcgaggatattacatggtaactcgacatttaactgactgaggaactcccaagctgttttccagcacagcagcaccacaaacaatctcaccagtaatggatgcagatgccagttcctctgcatctttgccaacacttgctactttccttctgtttttactatggttgtcctagcagttggaaagcaataccgtgctgtgtcacttgcataatgcactgagcctagtatgtcctgcacctggagcctccaactcagctttaactaaaggtcctttgcacggcagctcggagttactgcattcacagcaatgagaggagctgctcccagacacattcatgaggctcggcggtgcctccctggtggctaatgatgctgcatctttgtgtgcccttattgaccactcctacatcttctctgaagaaatgtctgtttgtattttttgcctgcactggtttttattttaaccctgaaaagctgctccccaatagctgaatctctctttcagcaaccctcagcagaggcctcaagtgccttgtctggaggtcttcactccaacttctttactgaagacctgaaacatgtttgctgcctgctcttttaactgcagtgtgctgcagcagggaagatgccagggtctcttgttcgataattacctatcacatcatttactagtcaatgccctggctaacagtctttcatgggatttctgtctatattttctcctcactcatttagtaaaattccgttaagaggacatgtcctcatcacactttgtgtcactagataaaccaaggcccagctgtcctcacctctagggcagctgtaaaaatgtgaaaagtccccacattgtacctctgacttgggcttcatcaaaatgtcatggacaggctgagtatgaataatttccagcttagagactttcgaatcctggacacacaagctgagctccctggaggcgtgcatgggtgtgtggacaccccagtttaaatcccatccgttcatattttctacttgcacctccttggggcacatgatcaatgtcatgtcagtggaggtggacacctcggcactagctaagggtgtgcagccatcactgacagtaaggtaagggggtccagctcctgagtctggctatttccgaaaatatttgggttcatcctctgagttagatttttgagtagcaacctgggagttgggaagtgggttgatagaggttggggttgtttggtttttctgggtttttttgagacagagtctccctctttcatccaggctggagtgaagtggcacaatctcagctcactacaacctctgcctccttggttcatgcagttcttatgtctctgcctcccaagtagctgggaccacaggaacacaccaccatacctggctgcttttgtgagtgtgtgtgtgtgtgtgtgtgtgtgtgtgtgtgtgtgtgttttagtagaaatggggttttactatgttggccaggctggtctcaaactcctggcctcaagtgatccgcctgcctcagcctcccaaagtgctgggattacaggcgtgagccaccgcgcctggccaggttgaattaggttctgatttcagttctcatatatgaacttgggtaaattacttgacccctaaagactcaattttcttctgtcaaaaaaggaaatcggacattatctctaagatttttttttttcttttgagacggagtctctcactgtcgcccaggctggagtgcagtggcacatctcggctcactgcaacctccacctctggggttcaagcgactctcctgcttcagcctcctgagtaactgggattacaggtgcccttcaccacgccctgctaatttttgtgtttttagtagagatggggtttcgccatgttggccaggctggtctcgaactcctgacctcaagtgatgggcctgccttagcctcccaaagtgctgggattacagtcatgagccactgtgcccagccattatctctaagatattttaattattatttctaaagtgatgtgactatagctatcatccaaattgcttaaatttgtccaaggactagctgaaatcaactattcttcccttaagaaagagaatatgtgagagagcaagagcgtgagaaagagcgagagcgagcgagcgagagacagtgaatgccaccacaacaaacagcccctctagcaatttcccacaaattgggtgtaagtgtcaatctccagctcagcctgcactccctcttgcaaaggctgtctctgaacacctggtcagccaccgtgctggggggtggggatctgcgtccaaatccctcgttatgtgcctgcaagtggctttcccctcattgctatgaatgcagtaacctggagcttccacgcaaagggcctttaattaaagttgagttggaagctccaggtgcaggactgactaggttcagtgcattacacaatcacagcagagtgtgatctgtgcagtagacttggataaacaatctatttttggtttatgttctgaatcaaattaaggtgaagaggaaaaagaatatttcagtagttagcacaaacaacagagcctgtagaaataatagcaaacatcggtttttgcaagccactccggctactcaatagatgattgcagacactggggtgtttctcaccaaggtgaggtgaccatcccataaccaagagggcctgagagttgggaacatgggcagtaaagaaaagtattctcacgctgactggctctttcacggtttgaggtccccaaggaaaaggaactggctctggagctgcctgggtttaaactaccaccaatgctacgagcttaatgacctttgcttcagcacactatttaagtaatctgtaaaacaaggataataataatagtatctggcacggaagtgttaatggctatgactactactattattacaattatttactttaccttatccttcatatatatacatacatatatatatacacatacatatatatatacacatacatatatatacacatatatatacacatacatatatatacacatatatacacattatatacacatatatatacacacatatatatatacacatatatatacacacatatatacacatatatacacacatatatatacacatatatatacacacatatatacacatatatacacacatacatatatatacactatatatacacacatatatacacacatatatatacacatatatacacacatatatatacacacatatatacacacatatatatacacacatatatatacacacatatatatatatatatatatatatatatatatatatatatacacacacacatttttttaagacatagtctcgctctgtaacccatgctggagtgcaatggcgtgatcttggctcactgcaacctccacctcctgggttcaagtgattctcctgcctcagcctcctgagcagctgggattacaggcacgcgccaccaggcccagctaacttttctgcatttttagtagagatggggtttcaccatgttggtcaggctggtctcaaactcctgacctcaagtgatctgcccgccttggcctcccaaagtgctgggattacaagcgtgagccaccatgcccagcctataccttcatattctttaaagcagtcaggaaatccacatctcaactgaggagaaactatccaattagactttttcttctactctcagctctgagtttaaaattctgtgactcattttcaaaccccctgttgtgaagatgttttcagtctcagttcaacataccaatgaagggaggtttcctaagacaatgtggaataatttttaagaccgtagctgcccaaacctggaaattagcagcctaacggcatagacacagactaatttccagtacaggcgatggacattcctgtgcatgaagtcttcaaactatgtgtaagagaaatccggctgagcatctctggggtagcccagctgtggatatgaagcattcgagagcttctgccaaagtctgatgatgtttaagctgacatgatattctactgggaatattcttcaacccactgcatttccatatgacgagaagcagaacccactcgcccacacactgaaaaagccagcaggaaagaaggctcactgaaagactggcccaatcctgtcagttctgtgtaacttgtgtaagtttggaccagttatctaacctcttgaagtctcattttcaccacctgcaaaactagaaaaataattctgttttctttaaaagccactgtgaggattagggagagtataggtaaaagtgccttgctcagcacacaactcagaggaggaacttgataaatggcagtcatcagcagtatcattatcaccattagtgtcactgccaccatccacaacagcatccccaccatcatcttcaccatccacagcaccatccctaccatcatcaccctcaccatcagcatcatcccaccatcaatagcagcatccccaccatcatcacttccaccatcaacaacagcatctccactatctccaccatccacaacagcatctccactatctccaccatcaacaacagcatctccactatctccaacagcatccccaccatcaccatcccaccatccacagcagcatcccaccatcatcatcttcaccatcatcatcttcaccatccacagcaggatccccaccatcatcttcaccatccacagcaggatccccaccatcatcttcaccattcacagcagcatcccaccatcatcatcttcaccatcagcatcatcccaccatccacagcagcatccccaccatcatcaacttcaccatccacagcaccatccataccatcatcaccttcaccatcagcatcatcccaccatcaatagcagcatccccaccatcatcacttccaccatcaacagcagcatccccaccatcatcatcaccccatcatcgacagcagcatcccaccaatatcatcttcaccatccatagcaggatccccaccatcatcaccccaatcatcaacaacagcatctccactatctccaccatcaataatagcatcccatcaccaccaacaccaccagcgtccccaccatcatcatcaccccatcatcaacagcagcatccacaccatcatcaccctcaccatcagcatcatcccaccatcaatagcagcatccccaccatcatcacttcctattgggggaaccagcccccaatatttcaacacaggttcttttctattttccctaagtgttggccagtctgagaaataaagagaaagagtacaaagaggtaaattttacagctgggccttcaggggtaacatcacatattggcaggttctgtgatgcccacctgagccacaaaaccagcaagtttttattagggatttcaaaaggggaggggtgtacaaatagggagtaggtcacagggatcacatgcttcagagggcaataaaagatcacaaggcagggggtgaaattagaattactgatgagtgtcccactgggcatgcattgtcttgataaacatcttaacaggaaacagggttcgagagcagacaactggtctgactagaattcaccaggctggaatttcccaatcctggtaagcctgagggcactgcaggagaccagggagaatttcatctcttatcttcaactgcataagacagacactcccagaacggccattcatagacctacccctgggaatgcattccttccccaggattattccttgctgggaaaagaattcagcaatatttctcctacttgctttctgcaagaagaaaaataaggctctattctgcccgaccccgcaggcagtcagaccttaatgttatcttcccttgttccctgaagatcgctgttgttctgttccttttcagggtgccctgatttcatattgttcaaacacatgttttacagtttgtaccattaatgcaatcatcacaggatcccgaggtgacatacatcctcagcttatgaagatgatgggattaagagattaaagacaggcataggaaattataagagtattgagtggggaaatgataaatgtccatgaaatcttcacaatttatgttcagagactgcagtaaaaacaggcataagaaattatgaaagtactaattttgggaactgataaatgtccatgaagtcttcacaatttatgttttgccgcagcttcagccggtccctccatttggggtccctgacttcccgcaacaacttccaccatcaacaatatcatctccactatctccaccatcaacagcagcatccccaccaccatcatcttcaccatcatcatcccaccatccacagcagcatccccaccatcatcatcttcaccatccacagcagcatccccaccattatcacttccaccatcaacatgatccctgccatcatcacctcaaccatcagcttcccaccatcatcatcatcagcagcagcagcaccatcatcatccacaccatccacagcagcatccacaccatcagtgtcacccccgccatcagcatcatcaaacccctactgctgctgtgtgccaagccctggacttctatgaaggaagaataactcagatgtggccctgtcctcaaacatcttgcagactgaactaggagttgagtcatagacattaacaaccgtaattgaaagaatgctattagaaagggtcagaaaagcaatcctggttttggaagaatgtgattctcttcagctggaggaaatcagagctgcttcctggagccagctgatgcagttcacagagccacgccctgcaccatacccctcacctgtcaaacagtgacactgctgaggaagtgactctcctcgctcccaactttactggggccgggagtaccagagctaaaaatcaggcctcttcctttgacaaacatgcctctcctggagatccacccagcccagtcccaaaggcacaattatgagttcaggctgacaggaaggcctggaggtccggggagtcccacatgccgggagactctgggtggaggagactcctgtgtgtgcactggtctctgcccatgctcatcagctattctcctgcaccgaggatccaaaacaaattaggaagcccaagttgggacatcttttgaccacataacacacgttttctccctgtctcactgcccgccggcagcactgacaggcaccttgatcacggcgtgcttgctgccagcctgacaaagcacacagcctcagtgctattcacaggcttcctaatgagccggcaccggatgcggccaggtttgggagctgaggtgggaacgctgcagctccggctccggctcgtgaatgtggggttgggatgacttcactgtgcctttctgtctcgggccttagagaggtgattctggcagctcatttattttctctgtctctctctgtgtctctgtctctctgtgtatctctgcctctgtctctgtcttaacacagtagaaagtgtcagtgtttaacagtgctcaggctctaagtggcccactcgtgtggaggggaaataattgtggtgtcattcttaccaacagtgctgtcgccaagacaaaataacttttttgcattcagggaagcaggggggtctcacacgagcgtatacggtgctatctctgcagccaaggtatagagctctcagactgaaaaataagaccccaaacagttttcagagttcacaaaatctatgaggttgaagaggttaagtcctaaactacttgggatcaacaaatttgtagcgagttgacagtatcacggggtgccaatgtgaactcctggatatctgctaatgatgatgcattctgagagtctggaattatctgaagactcgtgacaccatgaggccagtgctgctctcagtctgccctgctcaagactcgcgacaccgtgaggccagtgctgatctcaccccgccctgctgagactcacgacatcgtgaggccagtgctgctctcagcccgccctgctccgagactcgcaatgccgtgaggccagcactgctctcagcccaccctactttgcccgccactcttccttctgtcactcttctggctcctgtttgcgttttggcctttccagaagctgcacccaaaagcctcctacctggcaagtgaaaagcacagggcatgattaaagcagcgagttccaatccatgtcccgtccaccttggcctggggttagaggtcagttggctcataaccacccagaagatggagggacagtcatcgccacggggctcttattcactgagtgctacaccaggctgttttcggctttacatgccttaattttctctaaccctttcaatgactcgatggtacagacatgattacccacattttgcaaatgaggaaagaagatcctgcagtgaggaaagggcagagctaagatgcagcccttctccctaggctgtgtatgtctgtcgagtgacagacaccaaacacgccgagtgaacagaggaaccgtaagcaggtcggcttccatggagcacaggtctgggtgtggagggactgctagtgcagggtgggtggtagctgtcactgtgagtgttcagtggagggcagggacaggactgtctgggaggaaaccaggggagacagtcaggatgacggtggccagcatgcatcaacctgctctgcctcagatgctactgtgtatgctgggagcagaacaccatgccctggggccaattttccaccagagctccgcttcccaccaaaggtcataagaacaatcacatgagggggcaaacttttaaaaaactcaaatggacatcgtgaatgtggcatccaacatgtggaggccacggtcctcatcgctgtgtgcctccacacctgctcctccaggtggcatggctaagcagagggctgtgagggaagctgtgctatctctgcacaatctctctaggtggccctcctccagaaacagggataggggaaggtgggcttgttgaccacatctgggtggtgacagtttggggctgttctggatagagccactgtgggcagtcatgggccagctttcctgtgaatgcaggcgtccctcctcttggatagacatccagaggggaactgctgagtccaaggacagacgtatctttagcctttaagcagcttccaaatacaggttataacagcttgcattgcattccccctaatttgagaatttctatgtcctcatcaagagttggttttatggatttttttttaattttagccaatctagtgacatgaagtggttgttctttatggttttgtgaataaggatgctaagcacctttgatgccttcattggccatttgtatatctttttatgaagtatccgttcaaagtttttatacatttttgcatgggattgcttgcctcttttccctttggagcactactgagatataattgacatacaataaacagtacaggaggcatgacaatgaacacgtccgtcaccctgaatacattccggtgcccctggagacactgccctctcccatccctgtccacagctccaggcaatcccgaccagctttctgtcccttataacccagtttgcattttctacagctttccaaactggaattataacaatagctcctcttttgtcttttggtcaacagaaatgagactcactgtgctgtttcatgcatcaacagctcactccagtttattactgagtagcattccattttgtggatcaaacaaaatttctttgtccatttctgatagacatttgggttttttcagttgtgggcatttactatgaaagctaccatgaagatacgtgtgtaaatctttgaatgcacacatgctttcgtttgtcttgagtagaagtgggatggagggatcacaggcaagtaaacatttcacttttgaagaaactgtcaagacgttttccaaatcgttgttaatgttttacatttccactggtggcatatgagaggtccagctcctccacctccttgccaatacataggatggtcagtttgtattttgtttttttaaattttagccattcttataggtttgtagtggtatttcactgtgatttcaattttcatttccataatgaggaatgatactgaatatttcacattaaattgtcactcatttatcctctttggtgaagtgtttattcaaatcttttgcccattttttaaatttcaaaagcttttggggtacgcatggtttgggtcacatgtatgaatttaatagtggtgaagtctcagatattaatgcacccatcatccaagtaatgcacattgtacccaatatgtaggtttttttatccctctcccctctcaccctcccgcttctgagtctccaaagtccattagatcactctgtctgcctttgcatacccatagcttggctcccacttataagtcagaacataaggtaatcgattttcctttcctgagttacttcacttagaataatggcttccagctccatctaagtggctgcaagagacattattacattctttttcgtggctgagtagtattccatggtgtatatatatactacattttctttctttttttttttttttttttttttttttaagatggagtcttgctctgttgccaggctggagtgcagtggcacaatctcagctcactgcaacctccaactcccaagttcaagtgattctcctccttcagcctcccaagtagctgggactacaggcacccgccaccacgcctggctaattttttgtatttttagtagagacgaggtttcatcatgttggccaggatggtctcaatctcttgaggtcatgatccacctgcctcggccgcccaaagtgctatgattataggcgtgagccactgcacctttagccactcatcagtcaatgggcacttagactggttccatatctttgcaattgtgaattgtgctgcaataaacatatatctacaggtgcctttttgatatattgatttcttttcctttggatactcagtagtgagattgctggatcaaaagggtagatcaacttttagttctttatgaaatctccattctgttttccatagatgttgtactaatttacattcccacctgcagtggataagtgttcccttttcaccacagtcataccaacatctattgttttgtgactttttaataatagtcattcttgcaggagtatggtggtatctcattgtggttttaatttgcatttccttgatgattagtgatgttgagcatttttttcatatgttgttgcccatttgaatatcttcttttaagaaatgtctgttcacgtcatttgtccactttttaatgggatttttttttcttgctaaattgtttgagttccttgtagattctggatgttggtcctttgtcagatgcatagtttgcaaatattttctcccattctgtgggttttctgataatttcttttgctatatgaagcttttcagtttaattaggtccaatttatttttgttttagttgcatttgcttttggggtcttacccatgaactctttgccaaggccaatgtccagaagattttttcctacttaatcttctagaagttttatggtttcaggtcttagatttaagttgttgatccatcttgagttgatttttgtataaggtaagagataatgaggtaggaggcaggactcaacttcagaggccgggctgggttactgaaccaaattgaggactagttaaaacagggccaaggtggaagcaggtttccataagtctcacccaccaatatgccatgtcagtttacacttgccatgacaacaccaaggagtaactgcccctttccatggcaatgacctgatgacccaaaagttactaccccttccctagatatttctgcataaaccactcttaaccctcatgtaattaaaagtagctataaatatgactgcaaagcttccctgagctgctactctctgcctatggggtagcctggctctgcaggagcagtcacagagctaaaacactgccagagttgtaacactgccttttcaataaggttgctttcttttatctccagcttgcccttgaattctttcctgggcaaagccaagaaccctggtgggctaagccccactttggggctccttaccctgcatcaatagagatccagtttcattcttctacatgtggctatccagttttaccaaaaccatttatcaaacaggtgtcctttccccagtttatggttttctatgctttttcaaagatcagttggttgtaagtgtttgggtttatttctgggttctttattctgttccattggtctatgtgcctactcttctaccagtaccatgctgttttggtaactctagccttgtagtatagtttggagtcaggtaatgtgatgcctccagatctgttctttttgtttaggattgcttttgctatttgggctattttttggtgctatatgaaaataatgttggtattttgataggaatttcattaaatctgtagattgctttgggcagtgtgggcattttcatgaaattcttccaatccataagcatgggatgtgtttccatttgtttgtgtcatctacagtgtatttcagcagtgtcttgtagttctctgtatagagatctttcacctccttggttaagtatattgataggtattttatttattttctgaagccctcgtacaggggattgagttcttgatttgattctcagcttggtcattgttggtatatagcactgctactgatttgtgtacattgattttgtaacctgagactttcctgaattcgtttatgaaatctaggagtcttttggaggagtctttagggttttgtaggtatatcatatcattggcaaacagcaatagtttgacttcctcttttccattttggatgccctttatttccttctgttttctgactgctctggctaggacttccagtactatgttgaatagaagtggtgagagtgggcatccttgtcttctttcagttcgcaggggggatgctttcaacttttccccattccatataatgttggttgtgggtttatcatatatggcttttattattttgaggtaagtcccttctgtgccgagtttgttgagagtttttatcatgaagtgatgctgggttttattgaatgcttttcctgcatctattgagataatcgtatggtgtttgtttttaactgtttatgtgacgtatcacatttactgacttgcatgtgttaaaccatccctgcatccctgggatgaaacccacttgatcatggtttattatctttttgatgtgctgttgggttcagtcagctagtatttcgtagagggtttttgcctctatgttcatcagggatattggtctatagtttgcttttgttcattattttatccctgattttagtgtcagagtgatactggcttcatagaattagttagggaggattctctctgccctgatcctttggaatagtttcagtagaattggtaccaattctttgagtgtctggtataattcagctgtgaatccatctggtcctgggctttttttgttatgggcaatttttaagttactgattcaatctcactgcttgttattagtctgttcagggtttttattccttcctaatttaatctaggagggttgtatgcttgcaggaatatattcgtgtattcatttcttctagattttctagtttgtatgcatagaagtgttcataatagtcgtgaataatcttttgtatttctgtggtatagttgagcttattttaatcttcactcttcatttcttgattaatctagctaatggtccatcaattttgtttatattttcaaaaaaccaattttttgtttcatcttttgtatttgtttctttccttcaaattgatttagctctgttctgatctttgttattttcttcttccagctttgggtttagtttgttcatatttctctagttacttgatgtgtgacattaggttgtcactttgggctctttcagactttctgatataggcatttagcacagtgaactttcctcttagcattgcttttgccatatcccagaggttttgataacttgtgtcactattatcattcatttcaaagaatttgtaaacttccatcttgattttactgttaacccaaaaatcattgaggagcatatttttttatttccatgtatttgtgtagtttaaaaaattccttttggagtggatttctagttttattccactgtggtctgagaagatacttgatataattttaattttaaaaaatttattgagacttgttttgtagcctagtatacagtctttttttgtttcattactttttcttctaaaaagacgggatacacgtgcagaacatgcaggtttgttacctatgtatatgtgtgccatggtggtttgctgcacctattgacttgtcctctaatttccctccactctccccccaaccctcagcaggccctggtgtgtgttgttcccctccttgtgtccatgtgttctcactgttcaactaccacttatatgtgagaacatgcagtgtttgattttctgttcctgtgttagtttgttgaggatgatggcttctagcttcatccatgtccctccaagggacatgatctcattcctttttatggctgcatagtattccatggtgtatatgtaccacattttcttcatctactctattttggagaatgttccatgtgctcatgaggagaatgtatattctgcagttcttgattagaatgttatgtaaatatctgttagatccatttgttctagagtgtagactaagtccattgtttccttgttgactttctgtctcaatgatctgtcctgtactgtcagtgaagtattgaggtcccccagtgttggcatgttgctgcctatctcacttctcacatctagcagtaattattttatgaatctgagagctccagcatttggtgcatataaatttagaattgtaatatcttcttgttggattggcccttttatcatcatttaatgaccttctttgtctctttttactgttgttgctttaaagtctgttttatctgatattagaatgctcctgctcacttttggtttccatttgcatggaatatattttactacccctttaccttaactttatatgcatctttatgtgttaggtgactatgttgagatagcagatatttggtttgtgtctttttatccattctaccaatctgttatcttttaaatggaggatttaggccatttacattcaacactaatattgagatgtgagatattgtcccaatcatcatggagacaggaagtgtggctttcagaccacatctatcccagtccagcagcaaagccaggctcccagatcctgtgtttgtggctgcagcgtgcttcccactcccccctgggttatggccaagggagtttgtccccactcaagattagattgcaaatttcagttgggagcttctctcaacccgtggccactgactgagttggttggcagacttccgcaaggtcccctgtgaggcagaatggcttccccaatccatgctggagactgggaatgcacacagggctctttctactgcttctcctactttatattctccactgctccctaaatcagttccaggacttggtagggttaaggtcccgcccccatgggctgaattctccagtgggggtgcatatcttggaggcagtgtctccccctcacactgtggggcttacagttctttgcttggctcacagtgtaggctgcagcctgccacttctttcaaaggttctgtggtttcttttagttttcctgtcaagttctggtgtcgcttcttggaaaaaagttcacagtgtgaatctttacacactattttgtctttccaagtgggagaggcatgctaacaccgcttctaatccactgtcttgaaaaaaaatgcccatttttaatgtgctgcttttttagtttttagagatttttatacattctgaaattttttatcttaaaaagtgctatttgcaagtatttttctaagtatgtggcttgtcttttcaatcttttgtgtgtctttcgaagaagtgtcttcttttgaagaagaaaatttttaaattttgacaaagttctagttatcaattttttttaaggattgtgtttttgtatcatattgataccaatttggaggtaatttctaccttaacactattgagtctttagacacatgaccatgtatatatcaccattaatttgtcttattgttctcatcaatgtattgtagttttcattgtacattgtcttacacatattttagattcaacctcaattatttcataatttttgatgctactatattttttaaaattcatatttaattgttgctagtatacagaaataaattaatttttgtgtgctgactttgcactctacagcattgctatatttactagttttagtagcttttctgtaggttccaccaaatttttgacaaaggttatgtaatctgaatgcctctcatttcttcttgttttattgcactggctaagatcttcaatgtgacaggcagtggatcacctgaggtcaggagttcaagaccagcctggccaacatggtgaaacctagtctctactgaaaatgcaaaaattagccgggcatggtggtgggtgcctataatcccagctactcgggaggctgaggtaggagcatcacttgaacccaggaggcagagggttgcagtgagccaagattgtgccactgcactccagcctgggcaagaagaatgaacttccgtctcaaaagaaaaaaaaaagatcttcaatgcagtgttgaattgaagaggtaagagcagacatcctcgtctaatgccagattttaagtggaaagcattcagcccttcaccagttgatgtaatcttagatgtaggtttccgtcatggatggatggatgctgggttttgccaaatgctttttccagtatctactgagaccatcacatggtctatgtaactatggtgagttatgttggttgatgtttaaatgttcgatataccctgcatatctgggataaatctgccttgattatgatgcagtattcttttttatatattgttgaatttaatttgataaaaattgtttagaatttttgtttctatatttctgaagaataataatctgcagttttcttttaaaatctttctctgtatgattttgatctgttgacatttattgagacttattttatggcccagcatttgatctagtttgggaaatattctatataacatactcaaaaagaatgtgtgtttagcagtttttaggtgtatcattctataaacatcacttagcttagactggttaatgctgtggttcaaatcttctctatccttactgatactttatctatttgtttaatcagttactgacagaggagagtttcaatcattaatgatcatgatcgacctgtatgttcctctctttagtactctcatatatttcctttatgtatttgaagctctgaaattggttcataacatttttctatagcatcttaatgaattgaccatttagtcatcataaagtgtctctgtcatgaataacacttttagtcttgaagtccactctgtctaatattaacatgaccacaccagctttcctgcctttcgagtttccatcgtacacattttccatcctttaggtctaagttgccttcttcgcccaggcttggatctgggctccagtgagactcgagatccctttatgctctgcactcagccgccaggtttctgaaccatgggggagctctctgctttatggtccaagtgtcagtttgtgagtttctgaagcttctcttccccgtcggtcccaccctggctttctgcacccttagaaagattcaacagatctttttccaccatgctcccttgtccccagtcttcagaaggccacatggggcactccatagaggcctggtgctccttggcaggatttctcccagccctctccctcctccatccctagtgccgcatctcacatactcagcgaaagcccacaggaaagaggcgggggtgcagacactcgctttgcacagcctgtctctcaaatctgttccatgcacctcaagagtttcttaaaatttaggccgaattctccccacttcctgtgactggcttctgcttcttccattccaatgcgcatgaaagaagctgtggtctcctctccttggaatgggttcatccatccctttctggaatgcagttcatcctcttttcctgtgtcctcagctctggcagatttctcctggggctcactcgtgttgttggggtgggagggggatagtctcctggcagatttctcccgggggctcactcatgtggtcggggtgggaggagaatgggctcctgacactctgcaccctacgtccatcgtacacctgcaggaggtgtctcctggtcgtcccccaaggccgtcctcttggaagcccacctgggccacctaccccctctggcatgagtacgcctgggctcacctgccccctccgtcagaagcccgcctgggccacctgccccctctggcatgaacgcacctgggcccacctgccccctctgtcagaagcccgcctgggccacctgccccctctggcatgagcgcgcctgggcctacctgccccctctgtcagaagcccgcctgggccacctgccccctctggcatgagtgcacctttactttctgtgttccctccatcacagcacttgctttaattttttaattatattttttgcttgcttgttttctccctcctacccagcaaaactgtaaaatcctaaaggacagaaactaactttccttaatcatttccttaatctagcaccatttcttgtatgttaaatatgttttttaaacatttccaagataaatcagctagttaatggtattggtaagtaatgaatttctgactaaacctcctcagtaacagagtggacagggaatttatggtgttctgcatgatgagttcaaggactgtgaactggtgctaccacagtcaataaaacaggaagcgttaccaccctcacaatgcagaagtcgtaacgacaccttgatttagtgatcaataagtgctcaattagtgtttaaacgaggagaaagctctgagtcatctcgctaatgaacaaagagaaagagcatgattatattcccagtggaataaaataaaataattctgttatgacgtcaccagcatgaaggccctgaaaggcaatatgtttaggatatttctccatctacgctagagtttcatttttgatgatgggtacatagaaaacaatgatttataaaataattcacaggaagttgattgtaccttcaaagatcgtcagtatataaagcttaaatttccaattaaaatatttcatcagctgagaggggaggggagaagccggggcccagatctctaagtccctatatttacggggcagcaaaatctgcacggcagcgctgcagcctctggtcacgcacttcctgtgcttattcagtctttgttcattagcaagatgactaagagctttctcctcatttaaacactggacagaaaagaaaatgagttctgggttttcatgcatttttttaaatactgagaagcatctatcttaacaaagaagaaaaatacctaagccaaaatgccaccaagtgctcattttctgaataaccgtttgacagctgtgctaaatgtctgtgtgctggaatgaccacggagctcattaattcaaactgggacacctccgagtgggaaagaatgacttcctgataattatgctgagtaacagtagagaccaggactgtgaggccgaccatcgtgtgtaggagattccaaggtgacacagccaaacttatcagaaggtggaccctggctgctggtggaatatttgacatgaccggtgcccacgcccctctcccattcctctttcttgaaatggagagcaggcaagatgggggcagtggtggaagatgctcctcctccatgcacccagcagccctggggagcggcagggtcgcaacccaagagatgaacccccagtggccccgtcacgagctcccaacggaagggatgtcctagtgcagaggcagccaccacgctcgccccctgtactgggaaggccgccacgctcgccccgcgatggggaaggccgccacgctcgccgcctgatggggaaggccgccacgcttgccccgcgatggggaaggccgccacgctcgccccctgtatggggaaggccgccacgctcgccccctgtatggggaaggccgccacgctcgccccctgatggggaaggccgccacgctcgccgcctgatggggaaggccgccacgctcgccccgcgatggggaaggccgccacgctcgccccctgatggggaaggccgccacgctcgcccccgatggggaaggccgccacgctcgccgcctgatggggaaggccgccacgctcgccccctgatggggaaggccgccacgctcgccgcctgatggggaaggccgccacgctcgccccctgtatggggaaggccgccacgctcgccccctgatggggaagcccgccacgctcgccccctgatggggaaggccgccacgctcgccccctgatggggaaggccgccacgctcgccccctgtactggaaaggccgccacgcccgccccctgtagggggaaggccgccacgctcgccgccttgtatggggaaggccgccacgctcacccgctgtatggggaaggctgcttccagagcactccggggcgtgtgttgagaatgctggtgctggaatcctagtgcagtaagccaggaatggaaagacttcagtaaatacaactggttagtgtgacgaggccacgggccctttggcctaatgagcactgagctgctgagtccagcagaaccactgagcacctggaaagcatcccaggacatgcagtacactgtgctcggcctaggaaggcatcctgtctctggcaggaacttgctttccccaggggctgctatgagccatctcatggggcatcactaggatacctcccaatggctcatagcacgaattgctcaatatctaccaaagaccttcactctcaacgagttcctgcaatttgctacggtttgtttctaatgtgtggatgttgcggctgcttggccgacctcacgtctggctgctgagggcagggaagcactgcagccattccatttaccctcgaggcgaatccatgctgcgccttgtcccacaggcaaattccattctaactctgactcttttattttagtgccagggctatttaataaaataactgaaaccgaaggaggagcatgatgatgggttcaaaatggaacaactgaggctcccattgaatgaaaccaaatgctgtttgcaggtgacgactcgctcactggcccatccaaggcacattggacgagcctccaaggctacgctcctgcctttctctattcagtagcccgtgaagagggcccttggacgtcagtctaggtgagcacgccactgtcaagtcaggggggaaagacaggaaactgcttcacagaaaagtgtcaactgatttcccttctctcaaacttcttccgagtctctgaaacttttaatgacgcctcccccttccctcgtatgttactaaaaccatctctggactgcacgtgggttactttactgatcattcacttccagcgtctggggacgtgacgtcacggcgccgttacagaagcctgaaatctcccagcagcagtggaggcagagcacagggccccacagcccttctgataaagacacagcggggcagaggaggaggacaaagcaatgatttcagagctggaggtgctaaattaccaacgttcaagagggtgggagaaatgccagtttccaccgtgctgtgctgagacctgctctgtggtgccgaggcacaggtgtgcggagggaatatgtttgccagtgtcctggcgccctctgattcctctcatcagagtcggagacctccactgagcctggttcagactctcaacctaatttctatttcattttttaaagattattttatcaacgatagttacggttacagctattgctgactgggcactccatgaggagcttcacacgtggctctcatgacacctccagggccactacccctggtttacagctgaggactcgaggcacagaagctgagcggctccccctggccccagagcagtgggtggaggagcctctgacccaaggacagagctgcatgaaatccaccttctgcatccacaaaatccagcaggatgtctggcgcaccagacgtgcttagttgctctcagttaatgaataaaaactttaaatttagcctgtttaaaatagtgttaagtggaccagaccctctagggttaggcccacacagagagactcccacaggctcctggaaggctttggggcatgtttttcaggccagccagtggtcctgatgggaggtgggcctggcacagagcagggctgggactggcctttcattgtgagcctaaccttagagggagacctggggcccacagagccctgtgaccctgtacttccacgagggctgaagacccccaccctccaccatgaggggtgatttcaaccaaccaggaaacacagtccatgatcaggaaaaacacaaatatggcccaggtgccactgggccctcctgagcagcctctcaactgtggcctgtgggtctggcaccccgtggcccctgcatggctctgggccagcatcagggctctgtttggcggccgtggacagactggcttctgcattcaaacgtcattgtgacatcctcctgaagaggcaaggccacagcaaagatggctgcccaggagctgccctcggaaaggctccagagaaccatggggccaaggccgggccttccccaggcaccacctgctaagacacagaagtgcctcagcttcctcacctgcctgcacagaacgtgccaccttgtggggccaacttctgtggaaactcaccctgtggttcccacgcttggtgcaaggttccaggaagcccctaagctggcctgggattgagcttagtggccacgcgtcctctgggaggactctacctttcgaggtctgtgggggttgcccagagttaacttaagtcatttcaatggctcgatggcaggaacataatagaaactgggcccacattgcttcccacacatatcccagggccacagctcctggtgagaccccagtggagtccaagaggatgcagagggtcctcaggctttcctgtctcacaccagcatggcttccatcttagaaaggaaagtgtgtcaaattagagctgatgtaactaacgtttggcagaaaaggagtgtgtgagcgtcgccatcaaacccccaatgtccccagggccatcctgggcctcaacacctggtccaaaatcctatcccaggaagctggcagggctgggctccaaaggtgatttctgcagctcttgtccctccctctttccaggcaatgtgggacctgtgaactctggcctaacaagtcgtcataaaaatcatgcctgcttttccatttacaaaatttactgagattcctaattccgtgtccttaagatgttgagtgggcttcgcatagtgaagggtcttgggtggctctgtgatgcgggtccttgcagctcccactcgccctgcataaacactcctggggttcgcctccgagcctgtctggggtctgtgtgcccagggcatcaccttgtgttttggtgcccagaccctcatgcccacaggcagatggagcccttacgctgccctgggctgcccccggggcaggcttgccggggagcaggagctttccttggatgcagtagttgcacctggtgccccctaattccagccatgttcatggcccctcagtctacctcagtcaggtttcagtgtccactgctgtcccggatcctttctcaaagggtgaagagcagccacctatctcctctacctccctggtgtgcatctgtggtttaaatggtgggctttctggagtcacgacaccttgtcccaagaaagatcctacagagcctcacccagaggactaagcatttgtgggggtggctggactgggagcaggtgtcgctctaaggggccccaggaacaccgaagccctgttcacaggatgcccgctggcccgggaaacaggcgcaaagccaagaggagccagcgactaaggaaacatgcccaggtacctgcaccctgaaggaaaagccaaccccggcccggggaggaagtggaagggtcacctcagcggggggtctgtcctgcgccgtatgggtcctggcgagcacgtctgaggctggggcctgggacagggcctccaggaagggcaggtggcgtcggagggcgttggccagggcagcaccgccctcccgactgtacctcctctcgctgccaacgctgtgttttgagggcctgaaaaagcaaaagaaaccagacatcaaccgcatgtttgctggtgcctggagctgctctgtcccctgtggtgcctgggtgcatgcaaggggctgggagccgggctctcggtggccggcctggccttgctgctccatgaccatgggtttgaacttctcccgggcccccgagcctgtgtcctgcacgaggatggctaacagcacctgcctcgtggttgtggggatggacgattgacccctgctgagagcagaagacaggaagcaaaagcaatacatgggaaacaaggggaggggagaaagggaggaagctgcaggtgttggctgcaggctcagcaggaattctccaggaggctgaggcagccagaggccgggtgggcatggggggcccaaggcttggcatggcttctgctgggtttgtgggtagaccaaggaaggtggcggcccagaagctggaaaaggcaggaaccaggttctcgcctgataaatgtgcattgttttaggccttaggttgatgtacttcgccacagcctcgggacgtccatgcagtgctctcagcccctccgctgcagtccctgctgttaaacagtgattcacgcaccgccatcgcgtgcaccatgcagggcagggacgccggaggctagaaggacaaacacatgggacgcttcccgtgggcagacacatgtggtgcccaccctgctgagggcggcaggggtagggccagcgaggacaaggccaagaaccaggcacggctggccaggggccccatgggacagctgcgtgctgaaggcataaatccaggaggcagctggacgtgtcagccacatgtggcccccactaatgatgctcagagtccctgagaaagcagccacttgccagtggggcccccatcaccagcttgtgcagccacacggaaaggaagagcagaaccagggagattcactggaaaagtcgcggtaacgcccaacaggccccggagagacagagtcaggactccccatgtttatggggagccctggtggaggcctgggcatgcacagaggatgtccgtggccccctgagcctgcgccctgtccccctttaccctcagctgtggcggagagcttgcctgagccacggggcagcgtctcagcctgggacacgatgggcatggcctccctagggatgggcatggccctccctgcccagctcacccgcagactctgccgctggtctctgcacccaggactcagccgcccagagcttcacagcccccacggaggcctttgcttttttgcacatgaccaaaagggcccagagcatgctcctaaataaggaagataattcccataggagacgcctctaccagccaggtttaagaacacctgcgtgagtgactgcaccccacctccacattccagcaaggctctgtctcaaaaaaaaaaaaaaaaaaaaggaatataatgtgaggccggcatgggggctcgcagctataatcctggcactttgggaagtggaggcaggagggtcactagagcccaggaacttgaggctgcagtaagctacgatagcgccgctgtgctccagcctcaggcaacagaggaagaccctgtttcaacaacaacaaaaaaagtgtgtgcacgcgcgcgcatgtgcgtgtgtgagtttgtgtaagtgtgtgtgtgagtgtgtgaggggtgtgagtgcgtgtgtgcgtttgtctgtgtatgtgtgcgcctgcacgcacacaccatgcttctaataaaatgcaaagatttcgtagacatggagtttagacacagaccaaagagcttttaattctggttatttttagtttgtataattaattgagtgcgtcatttatgtccataaaagaacgggcatcaccattaaaaagatgggccagtctgggggcccttgctgtccggctctgctgcccacagacaagggcagggccctctgtgaacctgccgccctcagcaatgctcccaaatccccttcccgctgagagccatgctcagcgatgaccaatcacttcaggtccgacttgtgctgcagtggacggtccagacgccacaggccccggcgtcatgccccactgccagcacaagactcaggcctccctcataacaggctttacaggtgcggtcagctgccatctgcttctctcaggccagggagaggctaggtccgaggtggaggcaggtactttcctgagcgcccaggcactggctgcctcagagccctggggcatggctccaccttcaccttctcaacatctaagtctagatcctcgttagggcaagaagcccaaattacagatagtgtataactgtcacgtttaactgaccacaggttgcctccaagggacatcacaccacttaacatatgaaatacgagccttaaatagatccttgcaattctccctccagctctgatgcggtgttgacatgaattctgttgacagctatgttatcaacctcacaatacactttcatcatttttgtttaatcaacttctttaaatgtgatttaagtgacaggaaaacaccatctatcggtggatgcagttgccttcgcgtgttctctcattggtttccatctggcacctttcccttctgccagaacggcggctttaccagccctggtcatggagctctgtgggtgatgatgtccttcagcgtctgtatttctgagaaagccaataattttacctttgtatctgaaggatacttccatgggatatggaattctgggttgatgtttgtttgtttgtttttcctttcagtactttaaaaatgctttccatcgtcttctggcctggagcattctcaaggagaaacctgcagtggccttcatcatctcatctctctatgaaatgcacctttttttcctctggctgcttttaaggttggctttttatcactggttttgagaaattttattatgatatttcttagtcttcatgtttcttttttagggggcttattgagctttctggctctgtgagtttatcatttttatcatattgaaacaattttcctcattatttcttcaaatgatttttctgttcctgtctctcccgccttgggactccagttatacagatatttggcctttagatgtgtcccatagctcactggtgttttttatttttttttaattatccttccttgtttccttatggatagttcctattgctgtgtcttcaagttcactaatattttctaccacagtgtctaatctgctattcattccacccatgaaattttcctgtctcctacttattgtgtctgtgtcagttctgtgtctacactgatgaattttatgagttgcattttcctgctccttttcatgccagataatccatgtctatatattcacattgtgaattttaccttattgggtgatggacatttgcaatcccataaatattatttacctttgctctggcattcagttaagttccttgggaccagttcaaccctctcggttcttacttttaagtcttgtttggcagtatcagagcagcaattatctatgacaaattactccccactactaagacaggactctgtgggcattctacccaattatctggaaattatgaggtttgcaagtcttgataggtttgaagaagcactatgtcgcaccctgtgtgaatgtcagatactgtttgctctcatttttttggatggttcttttccctcatagacacaaggtcatcagtcatctaccaaatcctcagcagtggctgaaaatctccagggctctctgtgcactcttctcttttatactctgacctgtgaactcaagctgccttggtttccccagaccttcagctctgtctcatcaactctggcaggccactgagcaccactgtccctgaggcagctgggggcaagtgtcatcgccacacagctgcgtcccctcccaaaatggccctccaccatgggggtctgcctcacccacgtttataccccatctagggaggtctgcatcccacactggtccccagcccctgaggaggggtgagggctcctgaggcctctgtcatgaccacactgagtccaacctctcctcggccaaacccgtctcttcacttccccatgaggggtcttcccaagaccctgcatttggacttcaggactacagagtctgctgtccagacacccaaccgagatgtagctccccgggcacccctggggccctgcccacggctagtgaggatcttgggggacttcaatccagtgcccccgatgccagtggaaaggcgactatagatttctccttgagaagtgctccaggccagaagacgatggaaaacatttttaaagtagtgaaagaaaaaaaagtaacccagaattctatatcccatgaaaatatccttcaaatacaaaggtagacttatggctctcttagaaatacgacactgaaggacatcatccccagcagagctccacaatgagggatatgaacagcccaggctccctaggcaggcacaggaggtagatatgagtcaaggagcacctgtatacgtatatatgtatatacatgtatgtgtgtgtgtgtgcgtgtgcatgtgtatctcctttcacagaatttgatgctacattctgaacaaaatcgtattcagaaaaagtctgggtatgtctccaaacacagcactgtggcatcacccaacagcctgagggaggtgcagctcagactttgcaggtgctgagtgaggcagtattacttcaaatagaacatacactttgctaagaacaatttccacttctgggtatcagcaagaagtgtcttctatccaaacatgaccatctggtacttgtatatgggtctttagtgtgatttagaaacactttaggaaatacactggggcttgagtggatgtggaactcattacaaatttcccacatacagtaatggaataggtttccaggtactgtttccatgtaggatgttgattttcaagaacagatcactaacattaggtgtgtgatacctgcatggggcttataaaaaaaatcccatttttgcttgattatctcaattgataaacccaccatgtttttatttctagtgcctttttgtattactttgttcccacactgctcataaagatatacctgagactgggtaatttataaaggagaggtttaattgactcagttcagcatggctggggaggtctcaggaaacgtaacaatcatggcagaaggggaagcaaacacacccttcttcacaaggtggcaggagagagaagtgcaaggagcaaaggggaaagagtcccttataaaaccatcagatctcgtgaaaactcactcactatcatgagaacagcatggagacagccacctccatgattcaattacctcccactgggtccctcccatgacacgtgcagattatgagaactacaattcaagatgagatttgggtggggacacagccaaacaatatcacttttcaagttacactgatacagatgtaacaggcatataaattaccaaggcttttgcagttctttgcatctcaaatcatggctataatttccttggccattttttaattaatgaaatttcatgttctatgttgtcagagtgtaatttaactgcagttaatttacttttctggtattttgtctacttttctcactaattgctaatcaatgcaaatggaaccacctcataaatgtatctttaaattgtcgtattcatctttgcttcgcctctgtccatgcctggggacttgtttgtgatgctgcagtatgttacggcaatgagagggtttatcattatgccgcgtggtgttgtagcaattaacttgcacattgacttttgctctgtcatccagcttgaagtaggtcaaaacttcatacgtatgaattttgtactttaaaaagatgaaaaatgttttacacttagtagctattcccttctccattggcacacactggccttaggctcacgataatatgagatagtctagattgtcacccagtttgttaaaggaaaaaattccacattacaggcccatcttatgttttatatccaaccttcatggccacctgaagttctctgtgaagtcatcggtgctcatatacacagctggtatttgttgtccctgttcctgcctcaggagcatttagcatgatccctggttctctttagccattagcatgatccctggttctcaggtcctccttagcccttagcatgttcttctcaggttctggcttctcaggtcctccttagcccttagcatgttcttctcaggttctggcttctcaggtcctccttagcccttagcatgttcttctcaggttctggcttctcaggtcctccttagcccttagcatgttcttctcaggttctggcttctcaggtcctccttagcccttagcatgttcttctcaggttctggcttctcaggtcctccttagcccttagcatgttcttctcaggttctggcttctcaggtcctccttagcccttagcatgttcttctcaggttctggcttctcagatcctccttagcccttagcatgttcccaggttcttggttatcttagcccttagcatgttctcaagttctcagttctcaggttccccttccttgactctcttagcccttagcatgttctcagctcctccttagactttagcatgttctcaggttcctggttctcaggtcctccttagtccttagcatgttcttaggctctcagttctcaaggtctcttagcccttagcgtgttctcaggttcctggttctcaggttctcttagcctttagcatgttctcaggttcctggtgaccccttaggtgcgagctctgttcctcacactgggcactcatacctactgctttgctgattttccacactgcgtctctttctggctttctctcatggggcttactctgcttaagggacctcatgtgtgggaagagaagaaccagcaggagaaatgagcttgtggttgccactctggtaagcccaaaaacagggctggggattctgaagacttcattctaatgtcgcctttatttcatgaatggatgattggttttcagcaagttactcaatctctggagattaactgccttatgtaaagaacaccagctactatgtcactggcccatggtggattcttgttcagctgtgaagctcagaatgctctgaatacacatggagtggagaaagccaggtgacattcttcgttagtgtagctacccatgcaagaattcaaaggcttgggcagatcacgcattctgtccttcaccaccatttatccaacaaatgctggcccagggtccatctggtgaagggcacaggcaggcactaggggagcctggttagaagcagctcctgggagtggggagtgaggatgctgaaagccaacacggttccttatcatgcagcaggaatcagaacatgatccctttaatgaggaatgaaacaaatccattactataaaatcgcttgaaaatctagaggtgatggccacaaattaaatccaaaataagacaaaattacgaatactaaagaagaggcaaacgagccacaatccacgtatgagaaggcaaacaagccacaatccacatatgagaagaaaaagccccacagaggaatcagtccccttgctgctataactcgccctccgacctgacccaaggggctttggaaacaccacttgatcttataaaagctgagtttcaaacagaaccagtctcaaaggtcaaattctgaagatagccatggattaatcaggcaacaaaaacaaagaggaagcaggaaaggccctactcatttaggaaaatggaatccaagacaacaagcattaagggagatgcaggcaccatttaaacaacaatccactaatgatggacgccgaggacgagctgacgcagcccccgtgtgctaagcagcagagcctcagagcctatgaagctaaacacatcaacccccaaagaaaactcacagattactgtttttgtctgagaaatttcagaaagtcacaatataaataaggacatgttgaagtaatacaattgacacatttttacctaattacacatcatatatatataattataaactatttataaaagtctgtatcctgcaaatagttatacaaatatatttttgaagcgccaattgaagattaagtatggtatcaattaggccaaagaaaacctcaaaattaccaaagagtaaaagttgaacaaagtcacattctgactaaaatgcagtagaattagacactaatttgaagtttaaaaacaacacataaatatgaaaaagtagaaaagcctaccaaacatttattgtttcaaaaggatataaaatgacaattacagataatttagaacaaaagcaagtgagaattcatcagttatagaatgatgttaaaattatgctcaaaagcaaattatttatgtgatttcattatttttttaaaaatgaataaatagcgtaaataagttttactgaagaagttttatttaaaagagaacagcaaaaagaagaaaatctaagagataattctttttaaaaatcatgttacaagggtgaaaaaaaagtggttttttttttttgagacagggtctcactctctctcccaggctagagtgctgtgtgtgatcatgactcactgcagcctcaatcccccgggctcaggtgatcctctctctcagcctcctgagtagccaggcgccaccacacctggctaaagaaaacgtacgtttacaatgcaaaggaatataactacacaagtgctgagtaattttaaaaaccataatagtgagaactaagctctgattttttctcttgtccaaattcctatctaagaggtctgggaagtcataccccacaaaccataaattctcatcagatgggttttatttgaccctatatatcgtgactgacttttcagtctgactctggcagaacattatgagacaaagggaaaaaatcaaaatatttaactctaaaatatatttccttgcaatacctggaaattgccctgcaaagtctcttgtgggaaaaatccacattctatagggatctactttcccctttgttttccttccttcctttccagatccaggagataatcaaccaagagccaggcacccttttaggtccaataagaagcatcttacaacctgctttctctgaagtctgctaactgagagcttcctctgcacaataaaacttggtctccacaatcctttatcttaactggaacattttctattgatcccaggtcttcagataaactcaacgagttgtcaaccagaaaatgtttgaattcacctatagcctggaagcccctgctttgagttgtcccaccttctgaaccaaaccaatgtatttgattgatgtctcacgcctccctaaaatctataaaaccaagctgcaccctgagcaccctgggcccatgttctcagggcctcctgagggctgcatcacgggctatggccactcatatttggctcagaatacatctctaaaaatattttacagagtttgactcttttcatcaacaagagaatagcatccactacactgcatttacaaatgtggaaatcgctattaaaggatagcttataaatatcccaaatcacacaacagtgtaagcatattttaccaataatcgtggaagacaatgaaaatactctataaatgaagaacattcctaaaaaatatactagaaagtagatcaatggtaaaagaagttttccagaaatgttaggaaaaaaagaaaaacgatcacatttccatgaggaaatactgtgggcaactgttgaggaagacgatgggccacactgtttcttattctctcctgggcagggcctcatgggaacctccctcagtaggtgtcagagtcgggcatgaggaaggcaccggcaggactggggaggcctttgggtcagcaggagggacagcatgagagggagtgattgtccccaggcagtcatgtctgggcctggggaagagctggggaacatgcccagactcctctgccctccatgctgggtgcagcttgttccaaaccccaccaaagccagaggcccagaggacccgatggagcttacaggcatgaagcccatagcagggcaggggaagggagtgtggaggaaaggagtctggagaatatccagccaatgcctccctaaatgggcctctgttttgtgggcagggataattgctcttgcctgggttcaacactcacaaagaaagaatttagaaatccaacctacagaatggtaagagctgtttttatttgtaaccatagctagtgccatctacgttccaggctgataaaaatatttttacaaaatataatatgtgaaaagttactagcctgaaatataaagaacctataataaaagaaacaaacagaaaaatacaaaaagtcctttttatacagacaaagaccatatacagaaaattcacaaagaaaattccaatctcggccagatgtggtggctcatgcctgtaatcctagcactctgggaggccaaggtgggcggatcatgaggtcaggagttcaagaccagcctggccaacacggcaaaaccccatctctactaaaaatacaaaaattagctgggtatggtggcgcgcacctgtagtcccagctactcaggaggctgaggcaagagaattgcttgaacccaagaggtggaggctgtagtgagccaagatcgtgccactgcactccggcctaggtgatgaagcaagagccaaaaaaaaaaaaaaaaaaaaaaaaaagaagaggaaagaaagaggaaagaaaaaggaaggaaggaagggaggaaggaaggagaaaattccaatctcaaagcatatgtattttaaacttttaatctcacttataactcataaaacaaagataacataccatttttcataataaaactggcactgttttaaataataaaaactggcaatttttccaaatgaccacatttaacgttgtttagaaggcacaatccaggcgcctctccatggttgttgctgagtttgatttctcagaggcaggtcctccctggattgttctctatgtggcgcccctttcctcccacgtttggcagcttctgtttgccctgttctgcacccccccagagtgaggaggagccatcccttgcttggttttcccaattcttccagccctctattttttgcccttcttggccgtccaacccatccctatacttgatggagttcaaggtcattggggcagtgcacaacgcccccagtggaatttagagaggagtataaggagtttgaacacatccaaaatagaaattcaacacagctcaagttgaaaacattttggtgggtttttgtttggtttcctacagaaaagtcttacagactataacagcacattctctttgataaaggaggtattaaaggtagatacaccaggcacagaagcacaaagaggcagcccctgccctcagtgtgcgccgcgtgctgaagtcgcagcccctaacctcagtgtgcgccatgttctggggaaagacgcagcccctgccctcagcgtgagccgcgttctggggaaagacacggcccctgccctcagcgagcgccgtgtggtgaagacgaagcccccgccctcggtgtgcgccgcttgctggggaaagacgcagcccccgccctcagtgtgtgcggcgttctggggaaagaagcagccgccgccctcagcgtgcgccgtgtggtgaagacgaagcccccgccctcggtgtgcgccgcttgctggggaaagacgcagcccccgccctcagtgtgcgccgcgttctgaggaaagaggcaacccgcgccctcagtgtgtgcggcgtgctgggggacggttaccagttctccacacgttctcactcttgatcctgccaggacacttaactgctttccctatcagatggccatgagcatgaaagcagatatctaaattttgtgttactggaatctttctaaagactatgactctagaattgtctgtcagggaaaaatgaacttttcaaactaaacctttaggaaaggtcattttcatgtttttttttaaaaaacatgaaaaatagcacaatggctcaggaatccgacagtgccagctttcttactgtggtttgtctttagactaattttttaacctccctatgactcaatttcctcactttcaagaatcggtatgacattagtccatggtatgtatgacattaccacatcgtttgtatgacattagtaattaccacatagttttgagtacaaaataagataatatggaacaatatatttagctcagtatacgttgctatgctctgggaaaggatgataaagactttcacaattctgttttttgtctaaagcaaaaataatttcttactgagaaatgagaattctcgacttatctgctttcgaccaaggccttgaagatgcaggatttttctaagagtctcatggaaaaacgaagaacccctgggcatgtctcttactggagggtcaccccaatatcgctttctctcatgggaaccaaacttttccttacagacatcctaactttctgaaacgtctgcaccagaaagatggtgggtgctttgctacattaaaacaaacaaacaaacaaataataagtgtaatggctatggactgtgtcctgggagcaaggagcaacaagccacgtccacacttacctggctgggctggatgcttcaggacgcctcaggtaggttttcgggaggtctgcaagttcctggtccatcacatactgagtatagtcatcctgccacgtgaaacctgtggacaaaaattgcaaaaattatgtcatcattttggaaatttagccaaagctcttgcttcagtctcacaattagttgcatttcagcattaagttgatggtcccatcagcaaagtaagcctccctctcactgcagtttatcaagatctccttacagaaattccagctttctgaaacttctaggccaaaaagaaaactgatgctctgctgcattaatagtaataaaaaggcttgggtgagagtggagaaagctggccaaatagaagcctctaccaatcatcctccctgtaggaacaccaaattgaacaactgtccgcacagcaaagcaccttcatacgaaccaaatttcaggtgagtggtcacagtacctggttttaactccatatcattgaaagaggcactgaagagggtggaaaagatcatttggaattgctgatgtcacccctcacccatccccctgcagtggctgtgtgccccagagagagaacgcatgcacttgggagagagagcacagtgatagtgggacttggtattggaactcggtgctgccctgtcacagtaaaaacaacaggcaaaactcaaccagagcccatggagggaatatttagaccagccctagacagagcagtaccacccatcccagtggtcagaatctgagttctgacaagcctcaccaccatgggctaaagtgctctggggtcctaaataaacttgaaggctgcctatgatggaaggactacaattcctgggcaagtcctggtgctgtgcttggcttgtagccactggacttggggtgcagacaacctagtaaggtactagctggcacaactaagggtgctagtgtcacccttccctcaaccctaggcagcacagctcacagctccaaaagagactccttccttctccttgaggagaggagagggaagagtaaagaggactttatcttacaacttagataactgctcagccaagtaggatagggcactgggcagagtcatgaggcccccattccaggccctagctcccaggtgacatttctagacacaccttgggccaaaggaaaacccactgccttgaagggaaggtcccagtactgaaaggattcatcatctcctgactacagagcctttgggccctgaataatcaacagtggtacccaggcagtaccccatgggccttgggtaagactcagagatgtcctggcttcaggtctgatctggtacagtcctagtggtggggtggccacagaggtgcttgtgtcacccgtcacccagctccaggaagctcggggagggggggagagagagagaccgtccgttcgtttgtctcggagaatgtaagagaaaaaaagtctgcctggtaatccacaaaattcttctagattgtatccaagactgccaaggtgatacatctgtgagtctgaaacagccatgaaattactgggctttgagtggcccctaatgcagatatggctgcagggattaaaaacgtagatcacagaaccaaagtcttttcttttttttttttaatttatttattttttattattatactttaagttttagggtacatgtgcacattgtacaggttagttacatacgtatacatgtgccatgctggtgtgctgcacccactaactcgtcatctagcattaggtatatctcccaatgctatccctcccccctccccccaccccacaacagtccccagagtgtgatgttccccttcctgtgtccatgtgatctcattgttcaattcccgcctatgagtgagaatatgcggtgtttggttttttgttcttgcgatagtttactgagaatgatggtttccaatttcatccatgtccctacaaaggacatgcactcatcattttttatggctgcatagtattccatggtgtatatgtgccacattttcttaatccggtctatcattgttggacatttgggttggttccaagtctttgctattgtgaataatgccgcaataaacatacgtgtgcatgtgtctttatagcagcatgatttatagtcctttgggtatatacccagtaatgggatggctgggtcaaatggtatttctagttctagatccctgaggaatcgccacactgacttccacaatggttgaactagtttacaaagcaatggcaacaaaagacaaaattgacaaatgggatctaattaaactaaagagcttctgcacagcaaaagaaactaccatcagagtgaacaggcaacctacaaaatgggagaaaattttcgcaacctactcatctgacaaagggctaatatccagaatctacaatgaactcaaaacaaatttacaagaaaaaaacaaccccatcaaaaagtgggcaaagtcttttcaaatacctggaaagccttcccaagaaggatgaatacaaacaagccgagattttagcgactacaataaatacctaactcagacaccaacaaacatccaagagcatcaagactatccaggaaaacatgacctcaccaaacgaactaaataaggcaccagggaccaatcctggagagacagggatagatatgttacctttcagacaaagaattcaaaatagttgttttaaaaaaattcagtgaaattcaagataacatagaaaagacaatcagaatcctatccgataaacttaacaatgaaattagaataattaaaaacaatcatgcaaaatctctggagttgaaaaacataactgacccattgcagaatgcctcagactctcttgacagcagagttgaccaagcaagacaaagaattagtgagcttgaagactggctagttgaaaatatgccgtcagaggagaccaaagaaaaaaggattttaaaaaatgaagcacacctgcatgatctagaaaatagcctcaaaaagacaaatctaagatttatcacccttaaagaggagggagagagagaaagaggtagaaagtttagttgaaaggataataatgagaacttctcgaacctagagaaagatgtcagtgttcaagtataggaaggctataagaacactaaacagattcaacccaaataagactacctcaagacatttaattatcaaactcccaaaggtcaggaatgaagaaagaatcctaaaatctgcaaaagaaaataaacaaacaaacaaaaatacaatggagctgcagtacatctggcagcagacttttcagtggaaactttacaggccaggaaacgggattgttatttaaagtgttaaaggaaagaaacccttttattctgaaattgtatatccaacaaaaatgcatttcaaatatgaaggaaaaatactttcccagacaaacaaaagctgaaggattccatcaacagcagacctgtcctataagaaatgctaaagggatttcttccgtctgaaataaaagaatgttagtgagcagtaagaaatcatctaaaggtacaaaactcactggtaatagtaagtacacagaaaaacacagaatatcataacactgtaattgtggtgtgtaaactgctcatatctggagttaaaagactaaaagatgaacttatcaaataactccaacaacttttcagatataaagatataaatagaaacaacaaaaagttaaaaagtagggggatgaagctaaagtgtagagtttttattagttttctctgtgctggtttgttagtttgcttatgtaatcaatgttaagttgtcatccgtttaaaataatgggttataagatgttatttgcaagccttattgtaacctcaaatcaaaaaacataaacagatacaacaaaaagtaaaaagctagaaattaaaacataccaccaaagaaaatcactttcacttaaaaaaaaaagtaaggaaagaaataagaaagagaagaccacaaaacaatcagaaaacaaataacaaaatggcaagagtaagttcttacctatcaataataacaaatacacatggactaaactctccaatcaaaacacacagagtggttgaatggattaaaaaaaagacccaatcatctgttgcctataaaagacacacttcacctataaagacaaatatagactaaaaagaaagggatggaaaaagataatccgtgcaaatggaaaccaaaaaagagcaagagtagcagtacttgtatcagacaaaatagatttcaagacaaaactagcaaaagagacaaagaaggtcataatgataaaggggtaaattgagcaagaggacataacaattgtaaatatatatgtacccaacactggagcatccagatatataaaacaaattttattagagttaaagcaagagacagaccccaatacagtaacagctgaagacttccacatgccactttcagcactggacagatcattgagacagaaattcaacgaagatatattgaccaagctgcactgttaaccaaatggactgaattgacatttacagaacatttcattcaatggctatgaaatccacattcttctcctcaacacatgaataattctcaagaatagcccatacattatggcaaaaaaatgcatctttaaaaattcaaaaacaaactgaaattatatcaagtatcttctctgaccacaatggaataacactagaaatcaataacagggaaaattttggaaactatacaaacacatggaaattaaacaatatgcttctgaatgaccagtgggtcaatgaggaaattaaggagaaaatttagagatttcttgaaacaaataataatacaaacacaacataccaaaaacctgtgggatgcagcaaaagcagtactaagaggaaagtttatagctataagcaactacatcgagaaaaaagagaataccctcaaacaatctaatgatgcatcttttttttttttttttttttttgagacggagtctcgctctgtcgcccaggctggagtgcagtggcgcgatctcggctcactgcaagctccgcctcccgggttcacgccattctcctgcctcagcctcccgagtagctgggactacaggcgcccgctaccacgcctggctaattttttgtatttttagtagagacggggtttcaccgtgttagccaggatggtctcgatctcctgacctcgtgatccgcccgcctcggcctcccaaagtgatgcatcttaaagaactagaaaagcaagagcaaaccaaacccaaaattagtaaaagaaaagaaataataaagatcagagcagaaataaatcaagttggaatgaagaaaacaatacaaaagatcaatgaaacaaaaagttggtttttgaaaagataaaattgacaaaccattttctagtctaagaaaaaaagagaaaagacccaaataaataaaatcagagatgaaaaaggagacattacaactaatactgcagtaattcaaaggatcattagaggctactatgagcaactacatgccagtaaattagaaaacccagaagaaatggataaattcctagacacatagaatctaccaggactgaaccatgaagaaatcaaaaacctgaacagatcaataacaaataatgagattgaagctgtaataaagtctccaagcaaagaaaagcctgggacttgatcacttcactgctgaattttaccaaatatttaaagaagaatcttgctcaaactattccaaaagatagaggaggaggaaacacttccaaattcattccattaagccagtattaccctgataccaaaaccaaagacacatcaaaaaataaaacttcacgccaatatccctgatgaatattgatgcaaaaatcgtcaacaatcgtcaactgtcctggggataggacagtctcttctataaatggtgctgggaagactggataaccacatgcagaagaatgaaactagactcctatctcttcctatacaaaaatcacataaaaatggattaaagacataaatctaagacctcaaactatgaaacgactaaaagaaaacactgggaaaactccctagtacactggatagtgtaaagatttatttagtaataccccatgagcacaggcagccaaagcaacttgagtaatgctccacaagcacaggcaaccaaagcaaaactggacagatgggatcacatcaagtgaaaaaacctctgcacagcaaaggaaacaatcaacaaagtgaagagatacccacagaataggagaaaatatttgcaaagtattcatctgacaagggattaataaccagaatgtataaaaagctcaaacaactctgtagaaaaaaatttcaataatctaactttaaatgggcaaatagatataactctgaatagacatttctcaaaaaagacattcagacggcaaacaggcgtatgaaaaggtgctcaacatcactgatcatcagagaaatgcaaatcaaacctacaatgagatatcatctcacccagttcaaatggcttttgtccaaaagacaggcaataacaaatgctggcgaggatataggaaaaagggaaccctcatacacactgttggtagaattgtaaattagtacaactattatggagagtagtttggaggttccttaaaaagctgaaaatagagctataatataatccagcaatcccactgctaggtttatacccaaaaggtaatcagtgtatcaaattgatatccacactcccatgtttattgcagcactgttaacaacagtgaacatttggaagcaacctaaatgtccatcaacagatgaatggatttttaaaaatgtggtacctctacacagtggagtactattcagccataaaaaggtgagattctttcatttgcaacaacatggatggaactgaaaatcattatgttaagtgaaataagccagacatagaaagacaaactttgcatgttctcaccgatttgtgggaactaaaacttaaaacaactgaacttatagagagtagaacaacagctaccagaaggaagtaaccattgttactgggaaggaaattggcagggggcggggggcaagtgggaatggttaatgagtacaaaaatacagttaagtagaatgaataagatctggtacttgatagcacaacagggtaactacagtcaacaataatttattgtacatttacaaataactaagagtataactggattatttgtaacacaatgaaaggataaatacttcaggtgatgaacatcccatttaccctgacgtgattattatgcattgtatgcctgtatcaaaatatcccatgtaccccataaatatatacacctgtgtacccacaaaaattaaaaattaaaaaaatagacttaatgggtgctgactatggctagacagcaaggagccttacaccaaatacaagtttagttagaagacagatttttatctactatgaaagatggaaacatcttccatctacatggaaatattgtggtcacagcaaagatactcctcatccacaataagcacatagtacccgccactcacccactcctctacctgcccgccaccatatcttaggtattttgttcttcctaacaaaatcttaaaagacagcaattggaatggaataaggggtattgttactgtgaaagcaattatcatggggcttaatgtactgtatccgggagccaattacattatatttatactcaaatgttatgacaaagagctttataacaagggtgaagtagttatgaaggcaaaatccatgtgattatgcattaattacatgcactgtggatcacatgataattatgctcaaaattaccaaataactctcaagaataattattatgcaatttgtacatgttagatcttatggtaacactttagcacttagaactaccccatgcaattatccataattatctaatcactaaatatcatgtaattacagagatatatttttatgccctgtacaaaaacacattaccaaaatcttcaaatcaggatggctctgtgcttgtgtgtgtgtgtgtgtgtgtgtgtgtgtgtgtgtgtgtgtgtgtggcgtaggaagtccagaacatgatgagaaccacatattctggatggaattaaaagagctcagtaaatataagctatcttcatgaacacacaaatatttttttcacatgcaaatctagattttttaaatgttatagacggcaaattaaagcaattgtcatatttctaaatctcaaaagcctaaatggcattacctgaagtgaagaatgataggaaaattcaccattaggatggcctccaacttactctaagctgctctagttggaatatatcacttagagtataggtcgctgcagaaaacaggccccacactcactactatccaatttaagattaaatgtacttaataataatcaagtctatcccatttgccaaagcaacttaaaaacacccactatgaaatgtacttttgtttatatagctatttctgatccattcttgggagtatactcaactgaaagcacatttgcaatgttagtataatatctattattgtggatttagaaataaggatattttaaccacgccattcctaaaagggattctcttaatattaatatttatcaggaaacagaaaatcaatggcacaaaaagaacttttcatgaaaaatatcatttataaaatttaaataactaaaatttaaaaatttttatctaaaaatcatataagtctgagttatgtcaactttgggatctatgataaaggctcagttcttccagaacaacagttggtcaactactcagaatcatctgtactgggcagtctgagaggaccctgtataccttagcccagccatctcagccttcccggaagtcagaagaaactgtgctcttagatataaaaaacaaacaaaacaatgcagaggtatgggagtttaagcatctcctatgaacttctgtccgtggcatatcttggagaaaatataaccctgggaagaaggaatccactcccagagatgacatacgtcttcccactaagtacaactaaaatctctgagcatacgtaaaacaagcataagactctgaaggatggcaatacgaaggcagagcagagaaggacatggtggtggattccctgggttttctttttgcctcaggtacctcagacttggagtcaaagaggccgcaatccggaaacaccagcgtgtacacacacacacacacacacacacacacacacacaactaaagcagcctctctctaatcaaggagtcaggaaagaatcaactcagcaagacagaaaaatattagatattaacagctctaccccagcaaaacaccacagaaaaaagtacagcctctccctacccatgccaacaaaggccaaatggggatctagacttcctctttcatgaggctgtaataaggcctcccctcaggcctaccaggtagtgtcagagaaggccaagtagggatccagaactttcatctccattgggttgtaattaccacaacccctgcagtgccagcagagaccatctgggaagttgaaactcccacccctctccctaaccaatcagtaaaaagaccccaccttcaggtatcaacagaggcctcctggggaatctagacttccatctccctgtcagttacaaggaatcaccaccaccaccccttacccccagaagaggagtgtccaaaaagagacagttaaaatgcaaggtttaaatgagatccagaatcatgacataatacaaaaatgtccagatttcaaaagaaaataactggttatacaaagaacaaagaagatcacaaaataaatagaaaagagacaatccacagaaaccaacactgagatgaccgagatgttaaaattgcctgagaaagattttaaaccagttacgataaaaatgcttcaatgagcaattatgaacacacttgaaacaaatgaaaaagtaggatgtctcagaaaatagatgatgtaaataaaagccaaattgaaatattattactgaaagatacaataaccaaaataaacaacgcagtggatgcacataacagaaggatggagagacagaggaaagaatcagtgaagtgaggataaaacagtaggaattactcaatgtcaacaacacagagaaaatagtagaaaaacatgataaagcttcagcaactgcggggctataaccaaagatataatattcatgctatcagagtttcaaaaagaggagtgaaagaagacaagatgacaggtctgaaaaggtactcagaaaaataatggctgaaaacttctcaattttggaagaaacatgaacctaaaactttaagaagctaagcataccccaaacagggtaaacccaaatctcctccaagacacataataattaagtttctgaaaacttacaaagaaaaatcttaacagcagccagagaaaaatgacaacttacctacaaggaaaacacaattcaaatgacaggggatttcttatcagaaacaatggaggccacaaggaaacagcacatttttcaagtgctgaaagaaaaatatgtcaacccagaatcccacaagtctatcaatccagatacccagtgaagttatccttcaggaatcagggggaaataaagatatccccagaaaaaggaaaattgtgtttttcaccagaccaactctgaaagaattactaaatttatgtctccatatagaagagaaatataaaaaaaggaattttggagcatcaggaagaatgcaagaacatggcaagcaacaacctgagtaagtacaataagcattccttgagttttatgcttgacagttcaattaaacaccatactactgtcttatgtcattttaaatgcacatagaggaaatatttaaacaattataatataaatgaggggcataagtaaaatgtcataaaggaaggtaaagtttctatatttcacccaaactggtaaaattatgacaccagtaaactttaatgttatgaatatgtatatgaatattatatctagaacaataaataaaagaaagctatcaaagacatacactcaaaaacatagataaagtggatttccaaaatcattaaagtaactcaaaggaagggaggaagaaacaaagaaacaaaaaatacaagaacaagtagaaaatacaaaattaaatgagttttaaatcctaacatgttaataattacattaaatgtaaatgggctaaatatgacaatgaaaacactggctgagtgggttttttttaaaaaaagactcaactatacactatatgaagctcactttgaataaaatgatataggatggttgaaagtaaaaatatttttaaaaatatatcatgtaagtattaatcaaaggatggaagcaatagctatattaatatcagataagttaacatttagagtaaagaaaatggctacagagaagggaattacagagttataaataggtcaacccactaagaagatacagcaatcctatatatgaattatatagatagagcaactaaacaaaaaatcaacaaagatagaaaagaactcaacaataccattaatcaacaggatctaatgaacatttatggaacactgtacccaacaagagcagagtatatgttcttttcaattgctcatagaacacaaaccatgatagacttaatgctgggccataaaacaaacttcagcaaaattataatcattcagagtgtgttctctgaccacaatatagtcaaggtagaaatcaataacagaaagataatggggaaatataacaacatgttataaaataatccatgggtcaaagagaagataatacattacatgtaattaaaataaaagcacaacatatcaaaattcatggcacatacagttaaaactgtgctaagtgaaatttttagcactaaatgcttacattaaaaaagagggccctactggagcacttttgccagtggcccccacccaccctgccagggcacttttgccagcaaccaccaatggggcagtttagctggtggcccctgatagagtgctttcaccagcagcctagctgcaccttgacctcccagtgaagctggtactaaagctcaaggggccagaggacaaagccacaggcctggtcccaggtcaccagggttagagcatacagcccaggagttccaagctgaacctcggccctatgaaaaaattcagaaacaaagccaatcaactatatccaacttacacaacagcaaaactcttatgagaaataacgaacataaaaacaaaaagccctatccccaggacagcaacttcaaaaggataaaagaacatcagcactcacagatgagaaaacagcacaagaactctggcagttctaaaagccagagtgtctttttacctacaaatgaacacactagctacccagcaatggttcttaatcaaactgaaatgactgaaatgacagacataggattcagagtctagatggcaaggaagctcaatgagatacaggagaaagttgaaactcaatccaaggaaatgatttgagagttgaaagacaacatagccattttaagaataaccaaactgaacttctgaaatttaaaattcaatataagaatttcataataaaattggaagcattaacatcagaagagaccaagctgagagaagaattttagagcttaaaggcagttctttcaaatcaacacaggcagacaaaaataaagaaaaaagagtgttaaaaaatgaataaaacctctgaaaagtatgggattatgtaaagtgaccaaaactatgactcactggcatttctgaaagagaaggagagagagtaagcaacttggaaaacatagttgaggatacagtccatgaaaattttcccaatctcactagaggttgacatgatattcaaggaattcagaaaacccctgtgagatactatataagatgaccatccccaaggcatatggtcatcagattctccaaggttgttgtgaaagaaaaactcttaaaagcagctatagagaaagggcaggtcagttacaaagagaacccaccaggctgatagcagacatgtcagaaaaaagcttacaagccagaagagactgggggccctattttcagcatccttaaagaaaaaaaattccaatcaaggatttcatatcccacaaaactaagcatcataagcaaagaagaaataaaatcatttttagacaagtgaacactaaagaaattcactatcattagacccgctttacaaaggtccttaagggagtgctaaacatggaaacaagaaagatacctgcctccacaaaaacacaaatacgtagctcacttgcactataaagcaactatacaatcaagtttacatgaaaaccagctaacaacacaaatgacaggattaaatccttacatatcaatattaaccttgaatgtaaacaggctaaacacccacttaaaaggcatagattgacaagttggataaagaggcaagacccaactgtctgctgtcttcaagaacccatctcacatgtaatgacacactttggctcaaagtaaagggatggagaaagatctatcttgtaagtggaaaacaacaaagagcagaggttgctattcttatatcagatgaagcagattttaaaccagcaatgatcaaaaagaacaaagaggggctttacataatgaaaaagggttcaattcaacaagaagacttaactaccctaaatatttatgcacccaacattggggcacccagattcataaaacaagttcttagagacctataaagagacataaacacaataatagggggagatttcaatatcccatttgacagcattagacagatcatagaggcagaaaacaaagatattctggactcaaactcaacccttgatcaactgggtcttctagatgtctacagactacccaacaacaacagaatatatattcttcttatctgcacatgacacatactctaagatcagccacatgccataaagcaagtctcaaaaaaatccaaagaaaattgaaatcataccaaccactctcttggcccacatgtaatataaatacaaataaaaaacaagaagatctctcaaaactatccagttacatcaaaattaaacattttgctcctagatgacttttgggtaaagaatgaaattaatgcagaaatcaaaaaattatttgaaactaatgaaaactgtgacacaacataccagaatatttgggacacaactaaagcagtgttaaaaggaaagtttataacactaaacaactacatcataaagttagaaagatctcaaattaacaacataacattacacctggaagaactagaaaaaaaaagaacaaaccaatcccaaagctagcagaagaaaagaaaaaatcaaaatcagagcagaactgaatgaaattgggacacaaaaacacaaacaaaagaaagttcattttttgaaataataaataagattggtagaccactagctagattaacaaaaatagaagacctaaataagcacaataagaaatgacaacggtgatattacaagaaaaccttttaggttttctgggttttttccatttcttctagaacaccttgaagaaataaataaattcccagaaacatacaaccttgcaatattgaaccaggaagaaattcaaatcctgaacagatgaataatgactttcaaaattgaattgctaataaaaaaaaaacctaccaaccaaaaaagcccggaaccagacaaattcacagctgaattctaccagacatagaaagcagagctagtaacaatcctactaaaattacttcaaaaaaccaaaaagtaggaactcctccctaaatcattctatgacactaaacagaattgaaaacagaaaccatatgatcatcttaatagatacaggaagggctttcaataaaattcaacatcccttcatgttaaaaaccttcaacaaattaggcatcaaaggacaaagataaaaggaatatgcctcaaaataataagatccatcaattacaaacccaaaggcaacatcatattgaacaggcaaaagttggaagcatttcctgtgagaactggaatgaaacaaaatgcccactctcatcactcctattcaacatagtattggaattcctagccagagcagtcaggcaagggaaagaaataaaaggtatccaaataggaaaagaggaagtcaaattatctctcttcatagatgatatactatacatagaaacccctaaaaactctgccaaaagacttctagaactaataaatgacttcagtaaagtttcaggaaaaaaatatcaatgtataaaaaccagtagcatacaattcacttacccttagcaaaccaaaacaaaaactaaaaaactaatatcatttctacacatcaataatttccaagctgaaatccaaatcaagaatgcaatcccatttacaacatgtacaaaaagaataaaatacctaaggttatagctaaccaagaaagtgaaagatctctacaagaattaaaaaacactgcagagataatacaaacaaatggaacaacattccacgctcatggataggaagaatcaatattgttaaaatggtgacattacccaaagcaatttacagactcaatgctattcctatcaaaccaccagcatcatttttcacagaattagaaaaaaaaaagaattataaaattcatatggatccaaaaaaaaaaaaaggctgaatagccaaagcaaccctaagcaaaaagaacaaagctggaggaatcacactacctgacttcaaaatatactataaggccatagtaaccaaaacagcatggtactggtacaaaaacagacacatagaccaatggaacaggttagagaaaccagaaataaagccacacacctacaaacatctgatcttcaacaaagtcaacaaaaacaagaaatggagaaaggactccctattcaataaatggtgctaggatagctggttagccgtatgcagaagattgaaacttgactccttccttttaccatatacaaaaatcaatttaagatggcttaaagatttaaatgtaagacctaaaaccataaaaaccctagaagaaaatgtaggacacaccactctggacacaggccttagcaaagatttaatgatgacatctccaaaagcaactgcaagaaaaaaaaaaagacaagagggacctaattaaaccaaagcgcttctgaacaacaaaagcaactattaacaggtaaatagacaacctatagggtaggaaaaaatatttgcaaactatgcatctgcattagtccattttcacactgctgataaagacacacttgagactgggtaaactaaaagagcaagaggtttaatggacccacagttccatgtggctggggaggcctcacaatcatgatggaaggtgaaaagcacgtcttacatggcagcaggcaaaagagagaatgaatgccaagcggaaagggtttccttcggatccatcagatctcatgagacttattcactaacatgagaataatatgggggaaactgccccatgagtcaattatctcctaccaggtcccctcccacaagacgtggaaattatggaagctacaattcaagatgagatgtgggtggggacacagccaaaccatatcagcatccaaaagaaatttaatatccagaatctgtaaggaacttaaattattcaacaagaaaaaagcagccccattaaaaaatgggtaggagacatgaacagacacttcttaaaagaagacatagaagcggccaagaaacgtaggaaaaatgttcatcattagtaatcatcagagaaatgcaaaccaaaaccaaaatgagatactatttcacatgagccagaatgaatatttttaaaaagtcaaaaaataacagatgttgacaaggttgcagagaacagggaatgcttatacactgctggtgggaatgtaaagtagttcagctggtgtagaaagcagtttggaaatttctcagagaacttaacacagaactaccattcgacccagcaatcccagtatgggcatatagccaaaggaaaataaatcatcctaccaaaaagacacaagcacctgtacattcatcacggtattattcacaatagcaaagacatggaatcaacctagatacccactgatgatggactggaaaaagaaaatacggtacacatacaccatggaatactacacagccataaaaataatgaaatcatgtcctttgcagcaacatagatgcagctgtaggccatcatcctaatcaaattaatataggaacagaaaaccaaatactgcgtgttctcacttataagtggaaactaaacacggagtacacacagacacaaaaatgaggatgacagacgccgaggactatgaaaggcagagggtgggaggaagacgtgggttgaaaagctataagggactaggttcactacctgggtggcaggattgttatcacaccaaactgtaacaacacacaattcacccatgcatatgtaccctcaaaccgaaaacaaaagtcaaaagaaaaataaaagagaaagtctcaaatcaataatctgaattctttaagaatctgtaataaaggagaacacaataaacccaaataaagtagaagaaaataaataataaggataagaaaagaaatcaatgtaatttaagtgagaaaaaaatagagaagataaatgacaatgaaagctggttccttgaaaaaaatcagtaaaattgacaaatctctatcaagactaacaaaaaacaagagagaagacacaaattatcaatataagcaaagaaacaggggaagtcactacagactctgcaaacatcaaaaggataatcagggaataaacaactctacacacataaacctgacaacatagatgaaatggatcgactccttgaaatccacaagttacctcaattcatccaatgtgaaatcaataatttgaatacttctacactattaaggaacttgaattaataattaaatatctacccagaaagaaataatcaggcccagatggtttcaccaaagaattataccaaacatttaaagaggaattaaaacaaattccataaatatcttccagaaaatagaaggcgaggaaacagttcccaatttattttatgtagctaatattaacccgataccaaaagcaaacaaagacagtaaaaagaaacctacagaccaaaatccctcacaaatgtagacacaaaaatcctttacaaaatattagcaaataaaatccagcaatatatgaaaataatgatacatcatgaggtttattccaggaatgaaaggctggttcactatttcaaaacaaatcaatgtaatccaccatattaataggctaaagaagaaaaaaatcacatgattacagcaatcgatgcagaaaagacatttaaaaaattcaacactcattcatgaagaaaactttcagaaaaatagaaatcaaggggcactttatcaagctaacaataaacatctacaaaaccccacatttcactgtacttaatggtgagtaaccatcaaaagctttcactgaagactaggaacaaagcaaggatgtttgctctcaccaatcttattcaacataaagctggaagttccagccagtgcaatagggcaagataaaaaaaaaataaaagatatgcagacacaaaggaagaaattaaactgtacctatgtcctatttcctgattatctacacagaaagccccaaggactctacaaaaaatataaaaacctctcaaacctaataagttcttgtactatatactaacaatgaaggcatgaaaactgaaattaaaatactatttaaaaccactcaaagaatacctaggtgtaaatttaacaaaccacgtacaggacctatgtgctgaaacacaaacaatggtgatgaaagaaaccaaagatcaaaataaatgacagacataccatgttggtagatcagaagattcaacataataatgatgtcaactctccccagattgatacagaggtttcacataattcctataaaaaatcccagggaaatactttgtagatacagaaaagcaagttatatggaagagcaaaggaactagagtagctaaaacaatttgggaaaataaaaataaagtggaaggagtgatcatatataatttcaagtcttatataggtacaataatcaagactgtgtagtactgatgaacagatacaaataatacaatagaatagaaaacccagaaatagatccataaaaatatgtccaagttatttttgacaaagatgcataaacaatttaatggtaggaaaatttgccttttcaacaaatggtcctggagtgattggacatccacaggcaaaaacaggaacctctatgtaagcttcacagtctacacaaaagcaactcatggacataaatgtaaaaatgcaaaactataaaacttttagaaaaaaacaacagaaaatctttggaagctagagctaggcaaaaagttcttagacttgacatcaaacatcttccataaaaagaaaaattgacaaattggccttcatcaaaattaaaaacttttgctctgtggaaaggccctcttaagagctgaaacaatgagcgcagagttggagaaatattggcaaaccacgtatctgacaaaggactagtatcaggaatatacacagaactctcaaaactaaacattaaaaacattcaattagaaaaagggtgagagatgaaaagacatttcgacaaagaggatctactgatggcaaataaccacacgaagagatgctgaccatcatctcatcagggaaatgtcaattacacccacaatgagatgccaccacacacctatcagaaaggctaaaataaaaaatagggacaacatcaaatgctggaaaggatttggattcagaaaaactgtatcactgttacttttttttttcttttttactgtgaatgtcaaattttgttctggaaaatggtttgagagttcctttaaaaactaaacatatacttatcataagacacaaaaattgaacccctgaccattcatcccaaagaaatgaagacttatgttcaaacaaaatcttgtgtatgaatgttcaccagttttatttagaatagccccaaactgggaaccaccgagtccctcagcaggtggatggttaccatgcagcacctctgcaccacggagcaccacttggttatgaaggaaagaacgattagtacacaccacagcctcgctgaatctccccggaactgtgctgaggcaaaaagccaattcaagaaggatagatgctatataatttcatctagacaacacctgcataaccaactcttgtgtcctatgggaggcacatacggtttgagggcagccacagcacccatcttcctcaagtttgcagtctagtgtggaatgcaggtacgtaattagctaagatccaagttggagtgcaatcattatataataaagttatgagcaaactgctaagggaatagagaaatgaagaggtgaatttgtgttggaaagttaagaaagtttcatagaaacaagtggtatttgaactaagactggaaagataaatagaattctaacaggtggggatggattaggggaggaactctaagataacggagtagcatgggaagggacttggggctgtggcactgagtggtgcactcaggggatggtgtatgacatggggagggaggtgggggcagtgcaggaacagagggaggggagttgcatagtcacaggaggacgtcaaagctacatcaggaagcaccggtgcatctgtgcacagtggggagcagtaaaagctctgcatcggacagaaatatcatccaactgtgtcccagaaggaggataaaagtaacaatattaaaattaaaaatttaaagatacatagcagtttctatttgctgagccttaactatgagccagcactattctaagtccttcctattttaatcctcaggatttgtgaataatgaattaaagataatagggagaagggaaggcattcaataagagttacaaaaacggttcattagagagatgataaggttgtaaactcagagaacactagtgtggatagtttgagaagcagaattggtaaaaataatcagtatatgcaggattaaaggagaacaaggtgtcaaggttaactgcaagagaggttggctaggtcactggggaagaggaaatcacaaagaaggaaggctgggaacacaccaggtttgtgggtggggacgacgtttgtttcttctgcaggctgaactgtgtggcagaggagatccccgtgggaggggcaggtggagaatgccagggacagactgctgagagggaaacggaggcggcagagcaagtggtggcagcgtgcatggtggtcccggcttgcatgcaacacgtcaacacttaagcaggcaagggcatagcaaggacagaaaccaaggtgcacgctgcatatgaggaacgaagacagcgcttcccttttttttttttttttttccggtggtatccaagagtaagatatgcatcttgaagtgagacctggggaagtcccacaacacagcacttaccctaatcgcgtgggagcctctcacgtatcactgtgtcctattatatcatatttattctcttctgtctcactttttaaaatttctggctgcaacaccctaaaactctctcagggtcattaatgggctgtggcttgcagtttcaaacacactggatccaggcgacaggctgtttggagggaggagggagccaggctgaggaacagagatgcaaaggtttgggggtgaagctgaagatgactgactgccaagctaggctccagtggcaccagctccaggagaggaccctgggtcacaggacgaatggaggcctcagagctactcatcagagagtgcactgtgcgtggataaatgggaggagggaggtcagttgggagaaggtgtgagaaaatggaacagtagaaaatctgtcaaagtaaagaggatgggatagatcctccatctgttttaggagaaaaacaataaaaaagaggtgctgagcagaggagcaaaatcgacaataaagacagacagcccaaggtcatgtgctcaggagccaggagaagagagagcttcaagggtgagagagaggcggtattcatttcaaacgcggtaatactgagagataaatcagagtgataagaatcagaaatgaaatctattagcattttattttgcctacaggaaagctgtaaatgagaggctgatttcaaaatatgaacgtggtcagggttgaaatggggctgaggaggagcccctgacgtgtgacgggaagaccccaggtggcgaggaagaagtgtcggggaaaggcggtggtcagcacattgcaggatctagattttatgagtagaattcacgactatataaaaaaatacagtggcactctaatcagcagtaaactcatgctcaaaatgctctttacggaagatgaatgtgcagcttgccctcgcatcagcaaggaaagggctggtgagcagagtgtgaaggatgatcccatgcaggaagcctgtaggctttgtgaactgagaggaaacactccttaagaagatgacgtgaagtcaattaaagggatcaggtgggctctccttcccaatcagagaagacagggtcatagttccattcctgggctgctcaactgtgcacagtgggggtgcctgtcccaggcctggtcagggccagcacagactccttgacatggttttaactcacattttcacaatccctggaaaaatgcaaagcatttctataaagtagttaaggctttacatgtatatcaaatagaaatggaacctatacattcaagacattaaaaagctctatgcgtattcaaaggtggtagcattgttggtgatattttatgtctctttggaacacatttacaaagacagtttagaaaccagacaataaatcagtcttgttgttatatgttcacacttcacttttacattgaaaacagtgtgacaatcaacttagtcaatgactgggatgcaaataacttatttatcccacctggtatcaactaactttatgccacatcctcatgcatctgccttcaaaaagaagagtcaccattactgagaatgttcagagatcgccctctaccaggttactgaaggaagatcccaaagaagaattttaaacttttctgagcaacatcagaagctttccaaggtgaaatttttgaaaagaaaatattttctccagatacatttcatattccactacacctgttggaaatttctactaggagggacttctggtcccaaaatggtggtgcagtagaagcaaggtgacttcactctgctccacagagaagcaaaaacacacacagcactgacacaatcccagcaatggccacacactcaaatacaaaaggagacagttcccaggaacacagaaaattgaaaacaccccaagcagacagcaaaagcatcagaccaccatgtctgcaccatccctcctcataatctgtttggcatcaagagtatgggaaatttcccctcaactcatagcttctatgctggaaaaagtgagggtgaggtggacaatcagcttctccaacctcttgggggccctggctggagacctgttcctgcttcaacccatgggaagcgctgcaaatgtgtgaagggaaacatccctgaggacagccagagataaaagggggaggtgggactatagtccccagccccacaaactctactctgcaactcggtcaaagaggcactccatcagagtggctgctcacagcaccaccctgtagcaggaatgctccacaggtcccctcagcacgaggccccagccagccttctcacactgctggcatatcccctttgagacctctcccattcagtacaggcagcactcagatctttaaccttcagtacaggcagcactcagatctttaaccagagccaaggtaaacctgggcttaaggtgccatctagtgccgaaaaggagacagggacctagaagggggagaaaaagaaattccacaggtaaattatgtgactctctaagcaaatgtatccaataaaaactaaaacaagccaggagacaagactggagtaaataaataatccttcagtgcaaggacacagacacacatcaacaagaaacagcagcaaatgggaaaccatggccttctcaaatggacaaagtaaggaactagcaattggccctaataagatggcaatatgtgagttctcggaccaagaattcaaaatagcagttttaaggaaactcagtgatttccaagataacacagaaaagcaattcagaaatttaacaaagagattgaaacaatttttaaaaattcaaacagaaatcttggaactgagaaatacatttgctgaactgaaaaattcattatagcctctcaaaagcagaatggatcaagcagaggaaggaatcagtgagctcaaagacaggctatttgaaaatacacaatcagggatggaaaaagaacaaagaatgaagagggatgaagaccacttgcaagacagaaaattacctcaaaacatcaaatataagaatgattgatgttcaaggggaagctgagcaagaacaaggggtagaaagcttactcaaagaaacaataacagaaaacttctcaaaacttgagaaagacataaacatctaggtacaggaaggtcagagaacaccaaacagatttgacccaaataagactactgtaaggcatataataatcaaactctcaaaagtcaaggacaaagagagatcctaaaagcagcaagagaaaagaagcaaggaatatttaaagcagctctcatttgtctggcaaccaactactcaacagaaaccatacaggccaggagagagtaggatgacatttgcaaagtgctggaaggagaaaaaaatgaaaaacctgtcacccaagaatactatatccagcaaagcattccttcaactataaaggagagataaagtcttacccatacaaacaaaagctgagataattcaccactactagtcctgtgttacaaatcatgctaaagagagttcttcagtctgaaagaaaaaaaagtaacatgcaaaaagaaaatatttgaaggtataaaacacaccggtaaaagtaagcactcaaactaacccagaatactccaatactgtaattgtggggtgcaatccactcataaccgtagaatgaagcccaaaagacaaatctgtcaaaaacaataatagctgcagcaacctattaagagataggcagcatacaaatatgtagattgagacaataggaagtcaaagtgtggggggatggacttaaaatacagaggggttttttttcatttttttctttgtttctattcttttgtgatctcagttatctctttaagataacttgttatatgtttaagttgttttttataagtctcatggcaactacaataaaaaaaaactgtaacacatgcactaaaaataaaaagcaatgaattaaaacatactagcagagaaaatcactttaccacaaagtaagacagaaagcaagcaaggcaacaagaatgaggagttacaaaacaatgaaaaaacaaacaaaatagcagtagtcagtccttactcatcaataataacattgaatttaaatgtactcaattctccaattaaaagatatagaatggctgtatggataaagaattaagacccaactataagctgcccacaataaaccagccatatctataaagatggacattgactgaaaggaatagaaaaatatatttcaggctgggcacagaggctcacacctgtaatctcagcactttgacaggccaagttgagagaattgcttgtgtctgggagttcaaggccagcctgggcaatacagtgagactccatctctataaaaaaatcaaaaattagccgggcatggtggcatgtgcctgtggtctcagctacttgggatgctgaggtgggaggatcacttgagcatggaaggtcaagcctgcagtgagccatgatcacaccactgcactcagctgagataagagaatgtgaccctgtctcagaaacaacaaaaaagatattccatgcaagtggaaaccaaaaatgggcagaagcggctgtgcttatatcagataaaatagactgcaagtcaaagactgcaaaaagcaacaaagaacatcactatatagtgataaaagggtcaatcagcaagaggatataaaattataaatatatatgcacccaacaatggaacactgaagtatataaaacagacattaatagatccaaaggaagagatagcccgcaatacaataatggcagggcacttcaacaccccattctcagtaatggacagatcattcaggcaagaaatcaacaaagaaactttagagttaaactatacactacaccaaataggcttgactgacatttatatcatttcacccgactgctacagaatacccattcttttcatcagagcatgaagcactctccagaatacaccacatcttaggccacaaaacaagtctcaacaaattcaaagcagcagaaatcatatcaagtatcttttctgaccaccatagactaaaactagaaatcaataacaagaagaaccccagaaactacataaacacatgggaattaaacctccttctaaatggccaatgagtcaatgaagaagttaagaaggaaatttaaaaatgtcttgaaacaaatgaaaattgaaatatactacaatctatgggatacaataaaagcaatactaagaggcaagtgtataataataaatgcctacatcaaaaacatagaaagacttcaaataaacaacctaaccatgcacctcaaggaccaaggaaagcaagaacaagccaaacctaaaatgagtagaaggaaagaaataatacaaatcagagcagaaataaatgaaattaagataaaatatacagaaaaatcaataaaacaaaaagttttttgaaaaggtaaacaaaattgacaaacctttagctagactaagaaaaaaggaaagaagatccaaataaataaagtcagaaatgaaaaaggagatgtaacaactcagatcacaggaataaaaaggatcattagagacaattataaacaactgcatgctaagaaatgggaaaacctagaagaaataggtacattcctggacactaccaagattgaaccatgaagaaatagaaaacttcaacaaaccaataacaagtaattagatcaaagccataataaaaaaatttaccatcaaagaaaagcccaggacctgatgccttcactgatgaattctaccaaacatttgaagaaataataccaattctactcaaactcttcaaaaaattgaagaggagggaatacctccaaactcattctatgaggtcagtgttaccctgaaaccaaaagctgaaaagacaagacaaaaaaaaaggaggactataggcatagacacaaaaatcttcaacaaaatattagcaaactgaattcaagaacacattaaaaagatcattcaacatgatcgagtgggattcatcccagggatacaatgacgattcaaaatatgcatatcaataaacataatacatcacattaacagaattaagaacaaaactacatgatcatttcaatagatgctaaaaaagcatttgataaaattcaacatccctttatgataaaacactcatcaaaatgggtatagaaagaacatacctcaaaataataaacgctatatatgacaaatccacagctaacaccataatgaatggggaaacactgaaagccttttctctaacatttggagcaagacaaggatgttcactttcaccatttttatacaacatagcactgaagtcctgaccacagcaattaggcaagagaaagaaatacaggcacccaaattggaaaggaaaaagtcaaattagccttatttgcagacatcatgatcttatcatatttataaaacaccaaagacttcaaaacactgtcagaactgacaaattcagtaaagttgcaggatacaaaatcaacatacaaaaatcagcagcatttatatatgccaacagcaaacaatctaaaaaacaataaagtaaccctatttccaatagctaaacataatataagatacctagaaattaatttaaccaaagaagtaaaagatctatacaaggaaaacgatacaacactgaagaaaacaattgaagacgacacaaaaaactggaaagatattccatgctcatgtatccaaataactaatactgttaaaatgtcgatactacccaaagcaattgacagattcaatgcagtccctattagatgagatggggcttgttcagggtgggcatggctgtagacatcagtgtagtccctatcaaaatgccaatgacactcttcacagaaagaaaaatctctaaaatttacataagctcacaaaagaccccaaatacccaaagcaatcctgagcaaaaataacaaacatggaggtctcatatgacctgacttcgaaatatgcttcaaagctatagtatccaaataagcatagtactggcataaaaacagacacacagaccaatggaacagaatagagaatccaggtataaattcacacgtttataaccaactcatttttcacaaaggcaccaagagcagatattggggaaaggacaatctcttcaataaatgttgctgagaaaactggatttccatacacagaagaatgaaacaagactcctatgtctcaccatatacaaaaatcgaatcaaaatggattaaaggcttaaatataagacccgaaactatgaaaccgctaaaagaaaacactaaggaaacactccaggacattgatcagggcaaagatttttttggtaaggcctcaaaagcacagataaccaaagcaaataaagataaaatgagatcacatcaagctaaaaggcttctgcacagcaaaggaaacaaaaaagtgaagaaacaacccacagaatggagaaaatatatgtaaacgatccatctgacaagggattaataaccagaatatataaagagctcaaaacactcaacagcaaaaaaaaaacaaacctctaatttaaaaatgggcaaaagatctgaatagacatttttcaaataaaaacatataaatggccaacaggtacagtcatcaaataaaaacatacaaatggcaaacagatatagtcatcaaataaaaacacacaaatggccaacagatatagtcatcaaataaaaacacacaaatggtaaacagatatagtcatcaaataaaaacatacaaatggccaacagatatagtcatcaaataaaaacatacaaatggtaaaacagatatagtcatcaaataaaaacatacaaatggccaacaggtatagtcatcaaataaaaacatacaaatggccaacaggtatagtcatcaaataaaaacatataggtggtaaacagatatagtcatcaaataaaaacttacaaatggccaacagatatagtcatcagagaaatacaaatcaaaatcacaatgagatatcatcccactcccgttaaaatggctttttttttcttttgagacggagtcttgctctgtctcccaggctggagtgcaatggcacaatctccgctcactgcaacctccacctcctggattcaagcgattctcctgcctcagcctcccgagtagctgggattacaggcacctgccaccacacccggctaattttttgtatttttagtagagacggggtttcaccatgttggccaggctggtctcgatctcctgacctcatgatctgcctgcctcagcctcccaaagtgatgggattacaggcatgagccaccgggcctggcccaaaatggctcttattgaaaagacagaaaataacaaatggctggcacggatgtggagaggagccctcggacactgtgggtgggaatgtaaattagcgcagccactatagagaatagtatggaggttgctcagaaaaaagtgaaactagaactaacatatgatccagaaattccactaccgggtttgtatccaaaagaaaggaaatcaatatatcaaagagatatctgcatgcctgtgtttattgcaggactagtcacaatagcaaaaatatggagtcgacctaagtgtccatcaatggatgaatggatatagaaaatgcagaatatatacacaatggaatagtattctgccataaaaaagggtgcaagcctgtcataggcaccaacatgggaaactggaagtcattatgtgaagtgaaataagccaaacatagaaagacaaatactgcatgttctcactcatatgtgggagctaacaaatggatctcatgagggtgcctccgttgagattggtggttaccagaggatgggaaggggagctgggaggaaggaaggagagacattgactaatggctacaaatagacagaagaaataaaacctagtgtttgatagatcaacagggtgactagagttaacaataatgtatgtatgtttcaaattagccaaaagagaacagcttgactgttcctggcacaaagaaaagatgaatattttaggtgaagatcccaatcaccctgatttgatctttacaaattatacaatggtattaaattatcacatgtaccctgaaaatatgtacatcgattctgtatcaatatagaaaagctttctagagagcccatttttctacactcggcacctccacaacaagcaggaagcagccggtgtgaccacacctcccaaaaccaccattacgggctgcttagcattctaggacacggagacgtcgtgggggaaactgcagggtgactgaagaaggagaatcccagaactcccccaaggacgacagtgcagagcccacagcgttgttgaaggggctgggtgagctgtgagtagatcccaggcaccatcaccatcgtccttgccattgctggccgtcatctctggtcatcgcaaacagagccccttacggtacgttaggggatggtgtggaaacgcttggctaaatgaagatgctgctgacattgctacgtggtgcctgccacacaggcaggcaatgtcttcagaggagccccagcttctcctctcccttctcctcctcagatctaggtagggccgcttgtgctcccttggggcatgaaggaaaaacttcacgcaggccacccctctagccaccgtgctcattcagaagccacaccagacaaacgttgaggggtgggtaaggctgcctgggccctgggccctcagaacctcaagcaaagctgcccgaaggtggggtctgccctggcgtctgtggggtgggggcacacagtctgatcccagtctgacatgcaccagctgtgagcctcgagatgcctcaagtatgtcttcatggagccgccgtgaagacgtgatggcactcagtgggactccccacagggccagtggaacctgtccctgcctggccccccagttacccagttacccggtgcaacctgtccccgcctggtcacccagttacctggtggaacccgtccccacccagccactctgttaccaggtagaacctgtccctgcccgaccactctgctgtggggaaaagcaagagagatcagattgttactgtgtctgtgtagaaagaagtagacataggagactccattttgttatgtactaagaaaaattcttctgccttgagattctgttaatctatgaccttacccccaaccccgtgctctgtgaaacatgtgctgtgtcaactcagagttgaatggattaagggcggtgcaggatgtgctttgttaaacagatgcttgaaggcagcatgctccttaagagtcatcaccactccctaatctcaagtacccagggacacaaaaactgcggaaggccgcagggacctctgcctaggaaagccaggtattgtccaaggtttctccccatgtgatagtctgaaatatggcctcgtgggaagggaaagacctgaccgtcccccagcccgacacccgtaaagggtctgtgctgaggaggattagtaaaagaggagggaatgcctcttgcagttgagacaagaggaaggcatctgtctcctgcctgtccctgggcaatggaatgtctcggtataaaacccgattgtatgctccatctactgagatagggaaaaaccgccttagggctggaggtgggacctgcgggcagcaatactgctttgtaaagcactgagatgtttatgtgtatgcatatctaaaagcacagcacttaatcctttacattgtctatgatgcaaagacctttgttcacatgtttgtctgctgaccctctccccacaattgtcttgtgaccctgacacatccccctcttcgagaaacacccacagatgatcaataaatactaagggaactcagaggctggcgggatcctccatatgctgaacgctggttccccgggtccccttatttctttctctatactttgtctctgtgtctttttcttttccaaatctctcgtcccaccttacgagaaacacccacaggtgtgtaggggcaacccacccctacactctgccacttcgccgccacccatgctgccattgcactgatgctggcttctcgtttcctgctccccctctttctgaacaccccccggcagacacagcgcttacatgggagtgcacgaaggacacccttccctcacgctgagctcagcacagagcctgcaggagttgcccgcagcccggcggctgccatggagatacacacaggacacaagtgtctgtgatttctgtggccacacctgtgctggctgctcccgacgtccctggaggccagctgttccggcagggctggggcacacacacaatctccacagtgcagccgcggcctcctgctgggaacgtccgccccgtcctgcctctcggggcggctaagtcgctaagtcacgcccgtgtccggctctgattggaaaaggacgccctgggcttggctgggaggaaaggccagagggtccacaggggaaaagctcagctctggggggcatccctccctacagctgggcctggagaggagcccagcacacctgatggccatcgcagatcaggaaaccgtcctcccctccctcctgccctgggccaagcaggtcctgccagttactataaaataaagcggggggtgtgggtggcaccaaaagcacagcaggcgagacgcggggcacaggaaggaaggaagccacagcaaggcttctggtctctgccgctcatcagaaacctttcttccgccctcagccactgtccctcttaatccagccacattcacggtttctgtatcacccaaaacatcatgtttgttggaacttattttattttagattcaggtcttgttaaccattgctccaggatgctttactttccttgtcttaaacgggaacttcccaggtcatgttattaagaagtgggtgcccaggaagcacgggtcgcagctccacacggacagaggctcctgggacctgggactggctctaggtcatgacagctcagcaggattccagggaccgacggattcagtcctgaggggcagaccaggtcctggtaggtacagcaaggaggactcccctgcaagtctggagcaacaaggccccatgaagggagacaaaaccagggaccctgacacggtggctacaagggcagaggtgagagcagaggtgtgaaggccacgcagcccccaggacgcccccaggacaggctggcctatgctaagccacgcggctccccagactcctgaatggagaagagggtgctggcctcagaggctctcgtgagggccgtggaggggagcggaaagccaggcaggcagctgccacccgagcctggtgtttgctcggtcaaggtgccacagcccccatcaccccggggtgggggccaccaccatgccctgaggaccgagggccttctctgaggccagccagagggtcgatgttcctctgcgccttttccaaacagcaggatggtgcagaaacctcaggagggtaaaacccgtcagctattccccttggggcactgtctctctgtgcagggaagagtcagcagttctctctgttggagcagacgcgacctccagctctaaccaagactctcagaccacgttcaagttgcagccagcaaggagcccggagctggtatcccggagcttgttctttcctggggcgctttgtttcagtccacaagccaacgctccgtagcgcggcccccaccctcctgccgtgtggggcaaactattcaaagtcccctggccgtcagaaggttccagagggtgtgcagtcactttcctccccattctcacagcagcaggaccaatggggacgtggctttgtctgcatccctgcggcccctgccactgcactcgccaccatcaaaagcttctcctctcggagctcaaggacacatcaaatgatgtcacaccacttcacgcccttctcccagcagccccgcttcagtgcctgggaagctgcacaaaataagattctgttatcaagcaacgctgcacttcccacatctggatgcacgccaagacaagacgtcagtcatttcctggtgaaatgaaagaaagccacgcttcctccacgcccattgggtcacgaaatccttgctaatcctggccggggcactggaggatgctataaacaatcacggatctgagcaggtggatgaagggaacgtagatgacacgttgagggtgtggtgcgggcaatacacagactaagagtgggaactggcgaagtgagctataatcccaagcataaaggaaaggaggggaggtggcctccagcgcctctcctactagttaaaggagagagagggagaaaaataccactggaacctccaggcaggtcagacgggcacttggggcttatgtgcattatttgatggaacaagcagtgtctttgtttcttaggatggccatttttatctttttgataagtgtggaggaagttggcttagtataatttaatttctctctcctattaacaggtctcagtaaaacaatggggaatataccaaaaaagagagagagagagagaaagccaaaagaacataaaactagcacattagtcttttaaataaaaatgcagaggaagatagggaaggaaaagaatactacccaatattagtccagacctcgaatacgaccaggacagcctgccacagcagaaagaccaggtgtgtgggcttttgttttgtttttgttttctttcgagatggactctcactctgtcgcccaggctggagtgcagtagcgtgatctcagctcagtgcaaccactgcctcctggggtcaagtgattctcctgcctcggcctcccaagtagatgggattataggtgtgtgccaccacacccggctaatttttgtatttttagtagagacagggtttcaccatgttggccaggttggtcttgaactcctgacctcaggtgattcacctgcctgggactcccaaagtgctgggattacaggtgtggccactgtgcctgggcaggtgtttggtctttctaatggcaaaaggcttccttcgaactttacccttgctagatcttaatattgattcaatggggaggcatattttgctaacagcaaagaagaaaaacatcattgaataattgagatacaattctcagtctaaggccatcaaactgtttgtggacaggaagtggaagcagaagctgagcctggctttccaggcagaggcctctgctgtggtgcccaggaaccatgtcaggagcccacttctgaataaagatgccccaaggcagccccgtgggcaggtgccctcaggcccagggccccctgtgaacgtggatcatggtcttgggccagccagcatccagttccagcttcatggtggaagcatcaaagtgttcttggttaacccattttagaaattccttcagttaccaggtgactcttccctttctccagttcggctatagtttcctttcataacatatttgctgacggactttaattagaatccttcactttcggccgggcgtggtggcttacacctgtaatcctagcattttgggaggccaagggggaggatcacctgaggttaggagttcaagaccagcctggccaacatggcaaaaccctatctctacaaaaaatacaaaattagccgggcatgatggcaggtgcctgtaatcccagctacccaggaggttgaggcaggagaatggcttgaacccaggaggcaaaggttgcagtgagccaagatcacaccactgcattccagcctgggtgacagagtaagactctatctcaaaaaaagaattaataaataaataaaatttaaatttaaattttaaaaaaatccttcacttcccctgacacagactttaaagtacgaatcatcacacccaaattcagctctgaagacattgttttctgaagtgttcacgccctgttttgggcataccaggaaaggaggcagtgttctgttctgttttctcatatcctacctgaatcttatgattgattttacagctaacgttctacagctccccgttctcctaatcacagctctgaggtcctccccaaatgatcactgagtaagaaaacatcttgggaccttttttaagtcaaggaaatgatacagatggctcgaatgttcccacaaagtgcatatggtcctggagaagggagaccacagctctaccaaagctgccatctgaaaccccctcaggcccatatttctagacagcacagtcgcaaaccgaggggtccttatcttcactaaactagctttgcttttgctgtggagccttgtttgcttgcttctgttattgtccaaatcttaactgactctgacttggcctataaggcaggttcacccacccggtagagccatgctagtggctcctagcagcccaagagcccagcctgtaaccattcatccctggagggaaaggagctgaacctaaagtttccagtacaacctcctccccgccccgtcctctgcaccttcctctcccatcgtttattttcatttccatctccagtcttctatctcaagctccactttccacctgcctaggcatggacttctccaacctcttagttccgcttcttttcaattagagagaattctaaatcaaaagcgtgtctgcaaagtggagagattcaaaagatgagaatctcctctaaagattgcaatcagtggccaagagtgagggagggaattcacaaagttcaactcctttcagaaaacatctgtgttcgtcgggaatactggcctgtagtcttctttccctggagtgtttgtctggctttggcatcagggtaatgatggcctcgtaaaatctgtttggaagtgtttcctcctcttcagtgttttggaagagtttgagaagatgggtattagttcttctggaagtgtctggtaggattcagcaatgaaaacatccgttcgtgggcattattttggctgagacattttattactgattcaatctccttactcgttacagtctgtttttctgtttcttcatgattcagtcttggtaggttgtatgtgtctaggaagggctccatttcttccagattgtccaatgtcttggcgtataaatgtccacagtggtctcatgacccttggtgtttctgtggtatccattgtaacgcctcttctttcatttctgattctatttatttgagtcttctctcatttctcagtctagctgaagatctgtccattttgtgtcttttcaacaaaacaactcccaattttgatgatctttcctattgtttttctaggctatttgacttgtttcttctctaatcattgttatttccttccttccactaactttgggcttagtttgttcttcatttcctagtgccttggggtgtaatgttaggttgattagaaaacaaaataagctaacccaggaagctggagtgagaagattccagctagaaagcacagacgccttcacttcagcctcaacctgtgatcagagcagacacagcaggaaagcaggaaagctttcatttccatataccagactcagagctgaaaagaggcaaagaaagtcttctctcccaaaattaatcaatgcaagaggagcagaccatttcactgcttcacactggcacttctcaccttgtttctcttgcccaaccctagtaaaaatgattcccatgtgagcacaacagcctggacattgtggtttaaaagtctggtcactgtagtgagaggaaaaaaagatctgtctggtttcatgagaagaaatgctcagtggagagatggttactcgtgttttccagatggttctgtggaccccagaacgctgtcccagccaaactccaccacagataccaccttcagagttggccaggagctgcaggaagcccacaaaggttgatttggaagaagcaacatcctacaaaccagatccatccacacagagagcaggctctgctccttggcagtagtctctacttagtgctaagtactaagtacctcctaagttgtagtctctgcttagtactaggtacctcctgagtcatagtctctgctaagtactaagcactagtcactactatatatctcctaagtatcagtgtctacttagtactaactactgctaagcactaagtacctcctaaatagcagtctgtttagtacaaagtactattaatgataattacaaactacctcctaagtagcagtctttgcttagttctaagtactgctaaatactaagtacttcctaagtcacagtccctacttcgtatctaatacctcctaagcaacagtctctacttagtgctgatccctcccaccccgagtcactgacatcacttcctgtcctccctccttcctcacaatgtggcccattttccccactgaccaccaatgcagcacccagtccctgggaagagaacaagctgcctccttcccccaggacttccatggtggttcctgctcagccagaagggaaaggccaggctctgaagtccttccagctagctcctgcttcttcactcagaagtgcaggaaactgaccttcccattaatgcttcagagggggtagtagcacagaagttggaaacgcaaattaaaaggtgaaaggtcaaggcagtgtcctgaagaaaaaggctgaacaagcctcaaaaacacacctttcaggtattcatgaaaaaggaacagatacacagagtgtctgtagacagtgagctgtgtgttttgcgtgagtgtgaatgagcgtgttttgtgtgtgagctgtgcataagctatgagtgtttatgagtttttgtgtgagctgtgtgtgagggtgtgtgtgaatgagcatgttttttgtgtgtgttttgtgtgaaaatgagtgtgtgagcgtgagttttgtctgagttgtgtgtacaagctatgtatgtgttttgtgtgagctgacttgtgattgttttgtgtgtcagttgtgtgagttctgtaagctgtgtaagttgtgagtgtgtgtggttgtgagttgtgttagagtgaaagtgtgtgtgtgtgtgagttgtgtggttagcgtcagagtatgtgtgggtgtgtgtgagttgtgtgagtgtgagttgtgtgtgagagtgtgtatgagtgtgagttgtgcacatgtgagtgtatggggggcgtgtgttatataaaatattaaactttttctctgagctcagtgtctcccagtgtgacagagccccagtgccccggggtgggggccgtgggagaagcgacaggcctgagcgaggccagcagttcgaagcccctgctccctggctgtgtcatgtggacaagtgacgtcgtcttgaggatggcctcgtgaggcggcggtgggcatgaaatgagatgaggcgtccagccctgcatctgcagcgtggtcagcacagaggctgacatccatggtcatgccggaatccgtggtcatgccagaatccgtggccatgccggaatccatggccatgccggaatccgtggtcatgctggaatccacggtcatgccggaacccatggccatgccggaatccgtggtcatgctggaatccacggtcatgccggaacccatggccatgccagaatccgtggtcatgccagaatccgtggtcatgccggaatccactgatggtgcacgtgacccacgatgggaaaagtcacaagacagcttcagagctggtcaaacgggactgagaggggctgcaccaggaatgcgcggcctgttgagtttcagtgatgaggccatcagaagccatctccacgcacttctcatagagcgcatgggccgccctggcctgagtcaaaccaggggcctttcatccgagccgacctcttgacgtagagtcaggtctccttgccgagagtgggacctgcaccctgatccattactaggtggagggagttttccagactgggtttgtttgggttgatacaaaggcaactctgcacatccaaattcgcatggatgggagctgccttctaggcccctctggcagtttccccaggagtcaggcacagcgtctcatgacgtggctgtgtgaacaggtgagtggggatgtggaagcagccggctcagggccggcacacagtaggtcgcttgtgcgtggccaccatgctatccgccaaccccggtgccatggttatccctatgctgactcacaggcatggggctgctgactcacaggcatggagctggacatcagtctggctcgcaggcacactggaaagctgctcttaccctactaactttcagtcactgagacacaaatcagggcctggttggcagcagcgagaccgtcagggtgccctccccacctgcgacaataaacaccgcatgatgttaccctccagggatgacccaggattgtgtgaaaccaaaattcattaaaaatgaatattctgggccaggctgcattcactaattgattgattgattgattgataatttgatttatttaaaatacacctttctcgtaagcttctcggcacatacggcaaaatataaataccccacatgaataaaattatcacttgaaaaaactcatcacttgaaggaagagggggaaaaatccatgttatggaaatggcagcgtaatgggtgggtctcctggtgaccaaagacatcctgggaggtgagagatggagagagaaacagaggcttaaagatttggagtcgagacgcgtctctctaccaagaaggaagaagacggctctcactgcccccagctctaactccgtgtggtccacaggacaggaagtcccacacgggagaaggaggatgctggggctgctgacgataagaaaatgtgagcgtttcacaagtcaccgtgggtggtcattgtccttgtccacgggatttttcaaagtaggacaatctgtattttaaagaagttgcgttttcttcctttttgacctttttaaagacttatgcagaaagtgactgcaaccaaaagcatatggttttattgctaattcaaccttacagagctgacaggcaaggccgaccaatgtgtgggagggctctgatgacagcaacgacgacagtgaatccaggggtgacgtcccccaggcgtgtgcttcccatggccatgccggaatccgtggtcatgccggaatccactgatggtgcacgtgacccacgatgggaaaagtcacaagacagcttcagagctggtcaaacaggactgagaggggctacaccaggaatgcgcggcctgttgagtttctgtgatgaggccatcagaagccatctccacgcacttctcatagagcgcatggagcttcccagagcaagcgtgcagccatgccaggcctgggctgggagacatgtgtgaggacgcacgatggggttaggcagcctgagaaaccatccctggcacgggctgcctcaaggaatgaggaggtgtgggcttcccggctgcccatccccatatctgcacatagcccctgcatctcactacacagagcgtggcccgtgggtggcaccccccagcatggccaggagcaccgaggcgcacgctgggctctgagacgccccctggccaagaggggtggaggaagggggcaggcgccaggatctggaaggagatttccaacccacgtggggtctcacaggagaaggccgtgatgggaggtggggaagtggggaggagggcgctcttgaccgtgtctgcgtgtctaagcaaaggatacaggggcgcaaagggaaggagtggccaggggtgcccgtcccaggtgtgctcttcttcacggcgcccctgcttccccaccacgcccatgtccacggctcgtgggcagctgggcactgggccactcagacaccgtcctaaacactccacacaggtaacttgctccctctccagccacacagcaaacacagcaaaggggacttgggtgtctgcggtttttttgtttgtttgtttttaagatggagtttcattcttgtggcccaggctggagtgctatggtgcgatcttggctcactgcaatctccgcctcccgggttcaagcgattctcctgcctcagcctcctgagtaggtgggattacaggcatgcaccaccatgcctgggtaactttgtaattttagtagagatgggttttccccatgttggccaggctggtctcgaactcctcacctcaggtgatccacccaccttggcctcccaaagtgctgggattacaggcatgatccaccgcgcccagcctaccatctgtgttcttaaccatacctcgcacaagaccccagcctggagagaggagcgggagggggaggcctttatccccccattattagggagatcccaaaggcttgtctcataaaatcacagcacatcgtttctgagggtaaagaattagagactccttgaaaatgggagagaatgagtgatgctttaacaagcttctaagatgaaatcctaaagctggggctttgctcagagcccactaaggccaggcgggtcatgctgtccttccaggagcggccccaccccttccgtcttgacactcaaaccatcgggctggaggcaaatgtcagaggagaaaagcctttgcttttctcccagctctcctgtaagaagccgctgagctgccagctatgcagcaagcacctgcgtaccccaagatgcagccaggaaggagtggggtaccccgaccacgtggggacacagccctcccaaggggcagccagtgtttccctgaaggaactgaggccaggaagcttgtttctcatttacttgaattcaaatcttaaaatgtttgcaataaattcaaaattttcaaaatactgtgtaggactgaacaaaacaaaacactcccacacacaccccatgcacacatatcacatatgtgcatatatacaccacacagtgcacacatgccacacacggacccacatcacatacatgcacatacacacgcacacacaccacacatatgcacacatcacacccacacagcacatatgtgcatatatacaccacacacgtgcacacacgccacacacatgcacccacatcacatgcatgcccctacacacgcacacacatcacacatatgtgcacatcgcacacatcacatatgtgcatatagatgacacacgtgcacacatgccacacgcatgcacccacgtcacatacatgcacatacacatgcacacaccacacatatgcacgcatcacacgcagcacatatgtgcatatatacaccacacagtgcacacatgccacacacatgcacccacatcacatacatgcacatacacgtgcacaccacacatatgcacacatcacacatgcagcacatatgtgcatacataaacacacgtgcacacatgccacacacgtgcacccacatcacacacatacaccacacacaccacacatatgcacacatcacacacacacatgaacatgccacacacaccacacgtgaatcacatattcatatcaccacacacgtgcacacagcacacacacgaacacacatcacacacatgcacaccatacataaatgcatacatacacgtatctaccacacatcctgcatgcacacgcatcacacacatgcacaccatacacacatgcatacatatgcatatctaccacacctgcatgcacacaccctgcatgcacacacatcacacacatgcacaccatacatacatgcatacatacacatatctaccacacctgcacgcacacaccctgcatgcacacgcatcacacacatgcacaccatacatacatgcatacatacacatatctaccacacctgcacacacacaccctgcatgcacatgcatcacacacatgcacaccatacatgcatacatacacatatctaccacacctgcacacacacaccctgcatgcacacgcatcacacacatgcaccatacctgtgagttggattggctgatgagtctcccagttgtgacgtctatgcagccaataaaatgtggaagaggggtttcctatggtcagtgaggctttaggaccagaaaagccccatcccctggggactgcagagggctttatctcagcggtcagatgccctctgtgacatcattgccaagcatcattcactcataactttgacagacatgcactgaatgcattcccatttaaactgcttctcctgtgctccagcaagacgccacgtccctcccccagtgtgtgtgcacaacgacccgtgcagtgtcattgtgtcataaatgcatctgagtgtaatgcaagtgagagaacacgtgttggatgcacgacacacacacgagtttcccacactggacactcagtggatgcacaacacacacacgagtttcctacacttgacactcagatgcatttatggtctactcttaccaaagtaaaaagcaacagatgaattgttgaagtatggtacatcagctctaaatgcttcacatatttatggaaatattataataaagaaaatacttatactatcaaggaaagccgaacaacaggacccacaatcggatctatggggtggtccctgcctctaacctgagctcagataaagtaggacacttaagccctcatttttaggatgtatgaatgtggatattctctcattcctactgttgcataattttcagattctttctaatgcatataggttatttattgttatacatttatagcataatgcatgcctatttaagaaaattgaaatggtatcaaaacaaggcagaaattgcacagaacagcaaaagggaaccggcctccccatcctcatcccctctccatctgctcttaacccagactcaggttttgcttttctgcatacatgtacacacccatgtacacacacattccatacatatgcacacacacacgtacacacacatcccccccacatccacacagaaacagaagtgatagaaaacaacgatttttataagacaggtatattttctttgcaaaatctcaaacccccgaattgttgtggtttctctctcgtctgttttttgacgtgatgcaaaacatgtttgaatgttgcgccgtagtcctgattccttcaaatcaacatcagctgactcttagcagcactgtgctatcactatttcatatcattttcaaccagtcataaatgtgtcctcctaaccatgttgccacaaaagacaattccagatgctttgctatctggtagagaaaaaattaacaattcgcttattcttaaagtgtttgtggggaaattttccaaaagaaaaaaggtgaaattacgcacagtgagatgagcacatttttacttgattgtaacaagtacggaagttaaagccccctggaaatctcggtggaaatcacataaagtagactctaggagacaattccctatctaggctggcatgaaatcctaatgcatagaaagggtaatgggacacgcacaaagcgtactgttacttagcaggctctcaagaaccacacagcatgacggtaataatgtgctcatcttcaggagaatgggaacaagtgctcagggtcaaagaactgggctcccgtcctgcctgctgaggtccctggggtgctttggaaccctcattggtgagccgaggagaacctcgcctttctcccagcagagatcagatgtcctccttactgcacggatatgatacatgtgcatgcggtatgtgtgcatgtggggcgtgtgcaggtgtgcaatggatgtatacagtgcatgtggggcgtgtgcaggtgtgcaatggatgtatatggtgcatgtggggtgtgtgcaggtgtgcaatggatgtatatggtgcacgtgtggtgtgtgcaggtgtgcaatggatgtatatggtgcatgtggggggtgtgcaatggatgtctatggtgcctgtggggtgtgtgcaggtgtgcaatggatgtctatggtgcatgtggggcgtgtgcaggtgtgcaatggatgtctatggtgcacatgtggtgtgcacaggtgtgcaatggatgtctatggtgcacgtgtggtgtgtgcaggtgtgcaatggatgtctatggtgcacgtgtggtgtgcacaggtgtgcaatggatgtatatggtgcacgtatgcatgtgtgtgtccccctcattacctcacatgcgtatagagcacagacacacaccttaataaagcccagagtatgctcagcacagtaagtgtgcaaatcctgaaacgctgtaaaactggacctgtgacttgaagcctccattccattgttggggacacacaagcagggctccctaaggggaggtcagggaaacgagagccaccacatacctgccccaggctcagggcaggtcccagcaaagccccttcttggctctggcctcctcatcgtctgtgggacacgcccattttaccagaaacacaaagttggtccctccatccatccttcgcctaagcagcctgcctctccagttgccatggcaactctgctctggttgccgcacagcctcaagcctcagctgcttggagtgggtgggaacgcgagagcacttgagcaccagtggcctgacaactctgcctcgtccccatcacctctgcggcgagaatcagagcagtcgcagaagctcctgccacaccactcccataatctctcagtgccaattacttggaggaaaaatggaatcatccccgtgcccagggtggtgagtggtgtcaccgttcggatggctcagatgaaggcggccaactgggcagcgggaatggagcctttctaggcaggcagacccaagcatactgctcctgaattagtgtgtgggttggtgagcactccaggcggacctgatagcccggagccctatccctcactaccccccagccccagccctgcaccagttaccaaagacaaacaagagacacgtttctccaaaggatggcaggacaggacagggtaggaaggccccaccaccccatctccaggcacctggctttcagggaagccaccacgccagctgcacagacgcgtgacaggcaccccagtgctgaagcccaaggaggaggctgacagcccagttagatcgagtccaagcagcaaaatcacacagcacatcccgacaatcagccgcatcacatgcaaagccagagaacgaacctctcactccccaaatccaatcctccccaacatgagccacccccaccacccccgattgatggggagattaacatgccggaaaacgaccccatatcacaaagcagagcctggtttctcaaaggagaccttaatcttccctcacccttgggctggcggagtgagagtccctgtggcccgaggttcctcctgtcatgcccacggcactcagaactgaggctggcatgcggagggtgtggtttccccggaccagacctcgttgtccagaccaaacccaaccacagttccaatctgttttttagccaagtgctttaaatatgtgtcaagcactaatgctgggaggacttaaataaatacatgagccttttcttctaataaactggcagatccaccagatctacctgggccagtctcattttccaggcgactgagcctggatgtgcataactgaagctgcctgaggactggaggactgaccggggccagcacagcgggcgggggcctgaggactcgaggactgaccggggccagcacagcgggcggggctctgcccattaaatacactttcgcgtgtttcttttaacaacgtgctcctttcacagaagtgttttatgctgcatttcgtagaaaggaggaagcactcaacagaaccttccgtttccagtcaccgggtgattgccgcgcctgttgcttccacaaggaacccactgcaaaaccatctagggcaggggcagccccgggtctccagagcacacgccagactcccgaaacccaggccaggaccgcgccccacaggaatctgtcccctcccctcggcggtggtcaggttggccttgagtcttccatgagaatctgcagaatgcggcacacaggcgaggcaagactggggacttccttgaataacaaggtgtccagtgctttaaaaatactctaatggtgaggaaggaaattgagaaaatgattcattagaagagcggaataactctttttaagagcaggctcgcagaagtcgagctgggcaacagattctcgagccgctggcatccatatttatcgagcagaggaagcatccctgtaactgcacggcggcacagagccactgcccacggcacgacccgccctccatctctacgttcaggagcatccctgtaactggacagcagcacagagccactgcccacggcacgacccgccctccatctccacgttcaggagcatccctgtaactggacagcagcacagagccactgcccacggcacgacccgccctccatctccacgttcaggagcatccctgtaactggacagcagcacagagccactgcccacggcatgacccgccctccatctccacgttcaggagcatccctgtaactggacagtggcacagagccactgccgcccacagcacaacccgccccccatctccacgttcaggagcatccctgtaactggacagcggcacagagccactgcccacggcacgacccgccctccatctccacgttcaggagcatccctgtaactggacagtggcacagagccactgcccacggcacgacccgccctccatctccacgttcaggagcatccctgtaactggacagtggcacagagccactgcccacggcacgacccgccccccatctccacgttcaggagcatccctgtaactggacagtggcacagagccactgcccacggcacgacccgccctccatctccacgttcaggagcatccctgtaactggacagtggcacagagccactgcccacggcacgacctgccctccatctccacgttcaggagcatccctgtaactggacagtggcacagagccactgcccacggcacgacccgccctccatctccacgttcaggagcatccctgtaactggacagtggcacagagccaccgctgcacacagcagtaaaaatgtacagccctccctctctgcgttcaggagcagagggcatgagtttcacctccctacaggacaggaaactacgacagtcatctttgcacctgaagaaacaaattatttaaactttctcatcctgcagtttacttcttagacatgtctactttctatagcaaaatagatctggacacgaataataaatgcgaagcatggtgttacagggaaaatcccgaggcatggcccaggcccaggaagaagctgcagaaaaggagaaattcatgtccctcccctgctgtctttcctaggacatcccttccctgctcacccacgtccaggacctgttctttgtatagaggttcctgtcttctggtgttgagtgacacagagcaacccaaaagctccctcgcagaagcccctgcaggcttcacgacgtgtgagcaagggaggttctttggctaaagacccagacaaggcaatgatctacccaacaagatcaccaagggcaagacttcacgcgagcacagctgaggaagatgtttggggcttatctgaccgtttctacaagcatctctcaaatcacaccacagaggaaaccaaaaggcctggttcagcctccaggggccgggctctggaagaaagtaggcccagggcaggagtccacggccacagggaacagggaatgctgccttcctgtggggaacaagaggatcggccactccaccaccaaagatccgcggccgaaccaccttgctgaaatttaacctgaacttgcctcagcacgacagcttcaggattaaaagtggttcacggatttggggaactgcagaggacagtatgtgtgtacagagaattacacaatcatgtagctttttgtggagtgaggggtgttgagccctctgtccattcaggatgctttggaaatgtttttaccaaactatgagtctcacagtttcgaggactccattcccgctggggctgtgctgtccgccgcacccttgcactgggccctgacccaccctcccaccccatgcaccaagctcctggccactcttttctggctgccctgggctcgccagctgatgaggccaatgggccctcctgtccctggggcttggcactaagcctcagggcacccgtcctcactgcctgactacctttctctgcctgttccagctggacccactgagcaaaaccttctaaaccagacgatgctcagaactacccagcctcagaactacctctgtcctcagacttagatgccacaggaaaccccttgctgggagagccagtgctgactccagcttctcagcgggtttgattttggatgccgtgatcagaaccctgcaggtgctgtgtgttctgtctcatccagggatgtcccgtgtctactgcaggaccttcgggggaggcctgcctgcagaatctctgtgcaaaggtgatgtgggcagggagtgttgacgacgatgctttgatggtcctcttctgttgtctcccataggcacagctttggaccaagctctgtcccccacacaatggactgacctcttgggactcagagtctgatgccgactggctgaggaaagtggacgtggcagggaccccgcggctgcctctgctgagggggacaagagggcaccgaggcttctcctcactctgagaggagttgtcacgtgcacccttggagcaaggtcaccagccagtcacaagtgcagggccattattctggtccgcgccatgtggaattttaaaaagttttagatggtggaccattggcagttttagaaatacactaaggccccggaagacctacctattggttcaggtacctgaggaaaggtggtggaggagacagaagctggcgggggcgggggggaacctaggcagctcccgtgaggacaagtgatgacggcagagaagagggcaggactcaagcagctgggcgcccagcagaagctccatgttggacaaccatgcactaccctggtggcttgagagcaatagaatttgcccgagcttaaaattaaactcagccctaataggaagtttatggaatgattcaccatctgtaataaaatttatctttcttggagtagaaaagagtatttttcccaaaaaatatagtctctaagaaattgtggaataatcaaatctatctataacctaaacttatgcaaaaagaaacatggatgtgagtttattctgccaaaacgaggaataaggtccttcaagctaccagctttttgccgtctgggagcttgggtttcagaagatcccctgtaaattccggacccctagttccctggaacaggcatgagacaacctgctaaggcagactgagagcccagtcagatccctgctttccctgggatctgggttgaaatggagttgaatgagggacccggacaaccagaatcatgctcaaagaggtttcgagtatcctctgtctaccacccaggtcagcaggcggggtttgccctggaccagcgtgtggagagacccgggcacacggctgctcaggacgcagtcagacgcggaacccgacccctcaggtttgatcacagaaacctgtggcgtgtttctggggtaggatccttcctttaaataaaaacttacacaggaaccaaatgttcagagagtctacatcccagatttggctgattcttttctcctcagcgttacaatgagatggcgtgatttgaggacctgctgtacgtgcgctaaacgtctttttcttgttactctgacattcgaatccagtcaggcatcctgtattcaatctggaactctgctcttccttctggggggccctcaagctctgggaatcataggataagaggactgtggtgctggacgaccccgagcccccagttgggtgagcaagcgtgcagcagcgagaaatgtctgagcccccaggcttcaagcccacttcgctcagcctgggtctcacccactgtacaaaggatccaaccctgcagctccgctcctggaggactgaccaagacctgcggcggtgactgcccccgcccagccccacggcgctgacctggaactgccctgatgatgagaatcacagggatggcgtgcgtgccaggggtgagcccgcctgcagaggagctggtgagggccacagcccatgccctcccctgctgggctccttgctgtcagctgacagtaccctggcttcgcggtgacagcagctcttcctctgagcgctgcctcagctcatcacatgagctgagagtgggatgggtctcatcatagctaccttctatccattcttttttacctaaggctttcttgagaggcagttttcactttgcagcctgaatcctactctgcttcaggtaagataactgggcgggagcctgacagtttaagagacccaaatagaactaatctccaagcgggcacgtaagaacagctcacagcatggctgccccggctccttctcacctgggatttctcctggagcattcccgacgtccacacaccacatttcctccgctctgtctgctgcagagcctgctccagggtgaacacaggccgtcctgaatcagccgctgacgcctcccccggcatctccacgtgcagcccctgccctgcgcgactggcgtggaaagggctctggtgcgtctcacactctgctatcatcagcctccttcctgctccagttcttaagttcttgtcttttctgttgtctgcatttaatttaaatttctatgaatcgccgcgagacgaccctgtgagtacgcactccatgtgcatgtgcttctccacggagggagctgcctgggtggccgccctgctgatcctctgcatccagcctctggtaggatgggggcgaccacatcagataccacctctgtggaagggtctgtgtctcctcccctgccccccagtcacagctttgggggagatttcagaggtttcagggccttccctgaagcctttcctggaaggtggattctcttgctttttcagcaaccaccagccgttggctctgctggaatggcatccagggttttccttgttgcttctgtatctgtttgttttggcctatttgttgttcatattgttaagctttagggaggaacatttggggatctggtttcacaaggtcccaggaagccagaagtctcctgcagccacgcgaggtctgtccacgaggcctgcactgcgtggtcgtgctgggtagacacaccggctaggagacgaatgtggaagagttgatttcaactaaaggatccagagtggggtgagggaggtgcagcgtcggtacagggaggcaggaagcaggagcaggacgggttgaggcagcagcaccagcaacgcctgtgaaaccccttgtgcatgtccccgtgaggacccctgatgcctctgctgcctgatgctgcaaacgtctcttgagtgagagctcagtttccaaatggagtgacaaggagcagaacttctagacaccggaagtggaaggttgctcaaggcagatgcacaaataaatgacaaatggcagtttgataaccaacacaatgctaaagggccacaggcacaggccacagagaagggccatgggagcaggcaggccacgcaggacacggagaagagccagggaagcaggtggcccatgcagggcacagagccacccttccgggcagggcaagcggcctctcatcccacgtcacaacccgcagctgctgctgtgctgcagggaagagtgacatcacagacacccctcagagcccctgggaaaagcctaaaggaggctctggaggctccaccaaagaccgtcggcaccaacggctggcatgttccttgggaaattagaggagggcgtgtctgccaaaggtggatttataacaagagcccaagagtgggactcactcttcccggggatcccacctgctcccactcctcaccagggagcagcatggctgtgtccatgtgtccctgtgtgtacatgtatatatgcatgtgtttgtgtgtccttgtgtcccgggtgtacaggtatgtgtgtttgtgtgtccatgtgtccatgagtacacatatgtgcatgtgtttgtgtccatgtgtctctggtatacacgtatttgtccacgtgtccctttgtgtacacatatgtgaatgtgtttgtgtgtccatgtgtccctggtgtacatgtatgtgcgtttgtgtgtccatgtgtccatgagtacacatatgtgcatgtgtttctgtgtccatgtgtctctggtatacacatatgtatttgtccacgcgtccctttgtgtacacatatgtgaatgtgtttgtgtgtccatgtgtccctggtgtacatgtatgtgcgtttgtgtgtacatgtgtgtgcatgcacatatttgtgtgtatgtgcgtgcacgtctgtgtgcatattctgcacatgagaaccagaacgcctgcatgcctagcagacaagatgcctgctgtctctctgtggggtttggagaagcacatcagtacagtcaccaggctgcctaaaacacgacaaagcaaagccaattagcaatgctgaggactctcaggccaggatgccgccctaggctgccttcccaagtcagctagcttgacaaaagctttcatatcagtgcctgcaaaaacaccttctcagcacacagctcaaatgttattaaataattccatggggaaataagactttatacacaaaagtttgctttataaataatttgtcagtaatgtatagtaatgcatgcattcataaatcatggttaacagaagcagagacacaaccggatacgacttcttcagaaggcctagaaaaagagtctatttgaataaagcccagagggcctatagaatccaaagtatgcactcccacaataccccaaaacaaaagcaaaacaaccatgacatttatcctacggacattctaatgctgatagtaaggttaaaatccccgtccacataacacacccacacacaaacacaaactggctgttgccactagcgctccgtggggctgaagatggcaagaccccaagcctcaggctggcatttccagaaaacaccctcgctgccacgcctacacaaggggaagactggcagagacggctccttcctcctgacccagaagccaggagagaaagctgatcagtcgcacaggccgggacccagcatgccctgccactctggcaggtcctcaggcaggagtgtgagctcctaatgtctcaggagagacaggggaggagagaggaggcagacgggcaggagggggcctgtccctccagggtcagctcagccctcagagccacttgtaggaggtctgggcacaatagatacagtgactcctctgagaagctgcactgtgatgggacctggggtatccagcaaggggggcgtgaggctccgactggctgagtctgtgtcagcgtcagcaacagtgcccatcccgagctctttcccagcgcaccccaggacatggtggaaggtggaagaccctgcctacgggcagctcagagagcaggtggcagaggccagggtcggcctgcatgcagacaagcaggccgggcagcgggaagaagctcccggaaagatgggagcaccaggccacatggagcttggacagggcaaggagtcagggggagggaggtaacagcccctgggaaataataaagcacacgaacttgtgagacacaatcccttccccagattcccaactgtgtgatcctggcagggacccagcccaagcctcaggggctcacaggcagcgatgggccaaggaagggcttcagggcccagcgactccctgcaaactgagccctgtcctgcacaggtgagaagggaagggatggctcccctgccagttagagacagaggcttggtgcctgggggactccagccacccatcctgagccagaatgtggacgtccactccatagagcacacgaagaggataaaacagcagggtgcactccgggaccgcaggctccccccagcacacatgggtccctgtctgggcatgcacaccgccaggacacagcagctctgtggaagacgccatgcagaagcctcttcagggcaccgccatgagccaccctcagaacctgagctccaggcactacggacgattttaggaaacctgtgtctgttgcatttcgaatattctgacggggcttcccgttatttcaggagaagctaattccccacacagttagtgctcaggagggaggaatctaggagctcacttggccctaaagcccgtggtggctgcgccgtacttctgcccctcctcccgcggtgactgtgacaacaggaggggccacagccgccctgagcccctggttcccaggtgccagtggctgcagcacggaggccacctacggttcccagagcacgaagagctcctacgtccagcaggggatgttaagggtcacaccctcgaggccacagtgactgccccaaagtctgaggcctccccggttcactcctgcctccctcccctgctttcctgatgtaaacacagacacaagcatacacacttgcatggacacacaggcactcacactcacagatgcacactgcaacacatatacacacattcacacacaccgcacacacattcacacactgcacacacattcacacacactgcacacatattcacacacactgcaaacattcactgcacacacatacacacattcacacacactgcacacacacatacatacattcacacacatacacacattcacacacactgcacacgcagattcacacactgcaaacattcacgctgcacacacatacatgcacacacactgcacacacattcacacactgcacacatacacacattcacacactgcacacactacacacacattcacacacagcacacacattcacacacattcacacacactgcacacacacatacattcacactgcaaacattcactgcacacactgacacactgcacgcacattcacacatacacacattcacacacactgcacagattcacacacattgcgcacacatacattcacacactgcacatatacacacactgcacacacacattcacacacactacacacatacacattcacacactacacacattcacactgcacacattcacacactacacacacatacatacattcacacacattcacacactgcacacacatacattcacacacactgcaaacattcacactgcacacacattcacacactgcacacacacattcacacacatacacacattcacacactgcacacatacagattcacacacattgcacacacacattcacacacagtgcacacatacatattcacaaaatgcacatatacattcacattgcacacacacatcacacacaccacacacattcacacactgcacacacacactgcacacacatacacatatacacacattcacacactgcacacagtcacacattcacacacactgcacacacattcacacacactgcacatgcggtacctgtgtgcacccgcatgtgcctactgtatgcatgcatttacacacttgtgcatgcactgcacgtgttgcactcacagtcacatgtgcacaccgtgtgtgggtgtacacacagctgtacctactgcacatgtacatgtgtacacatatgagcacacacatgcacactgtacacacacgtgcacatccacattcatccacaatgcacaaacacatgcacacacacacaggcacacacacacagccatcttctcccgaccgcatcccacaggaggggcttcctcaccccatgctgcctgggtttggggcaggcccatcagcatctgctcagcttgctctggaggactttgccccaccgttgtttgtgtatttcccatcgctctgccacagagcctctgggtgctgggtgagggtctacttccaaattcctctcccgggcattccagctcctggcttctgtggcctgctggctaaggggaaggcacagccatgggtgggcgcccagcacctcaacggcccttttcccaccagggacccctccaaagcacccgtggcacctggggagaacctcctgccagttgtggacacctccctgcatgggacactgagtgagaggcacttgaaaatgtgaaagcaaggctgcaatgacggccgagccagagagcagcacctccctagcacaccctgcacccagcggaggtggctgaacacccgcgtcactcagcaaactccacggtgatgtgggccagctgaccaacttcatctagagccactgggctccctaaattcaagtccaactctacccctgccactctcacgcttcccaccttcatcttccagtgcaggactttggagcggcaaacggttattatttagaaggaggtcacatggtgaaagtccaagcctcctcaccttctagtcaaggcttgctgataacattgtccctaacgaacagccgcagcagcgcgtcaggcagaatgagcctctgtttagagttggtaacgaccgcctgaaaatgtcgtggtagaaataaaaccatgcaattcagtaggggaaataaaatacatatccagatggaactgcactgagacgctggcacactgacatctcaagttagacaatcatttaccactcaaagcaccgtggagtgaaggtagcttcccagggcagtttgctgagctcttcctgcgtgctggacacacacggtccaaagatcgtgctgagctcttcctacatgctggacacacacagcctgaagttcaccgcctaagccacactcctgtccatacgacagatcgccatgggccacacgtgacatgtgcatgggtacctgcagcagccggtggcagcaggtgacagtggggaccatcgagatggcccttgcaacagtctaggaagagactcactgccccagattcacctcgagactccaaatggtctcaggtcccttgcggggaccaaaggccgggagccaggagccgtgggctctctcctaatgctcttcctccatgcccaggctccaggactgcctcaagtgtgcactgaaaactgccccattccgaaaagccagcttgcaccttcttgttcctggtagggttccagaacagcgatgctgcttctcacgtggggtccctggtccttgctggcactttccttgatgcccgggaggagctgtcccatggagttttggggtcctcctcctcttccctcccttttctgcctttacacgaagagccccctgaccctcacctgctagagcagtcgaggtccgcctgttcacaacagccctcctggccatgggctctcctactccaggccccacagcccccaagcctggtgacattcccccaggtcactttctatctgctccaggtaggctacctcccagcccccaaggtagtgcatgcttcgtatgtgttccgcaggcccctggcccggtggagcagtgacttgctcagaaactagcaaggcctctcggtagtggcctcccactgacctggctccccacctgccatccactatgctcctggtgctggaaacacccccatgtggctcagagtggtccccagaggcccctgacacagacacgagcacatacctgcaggcacacacctgcaggggcacacttgtggatgcacacctgcaggcaggtacatacctatgggcacatacttgcaggcaggcacccacctgcgggcacacacctgtgggcacacacctgtgggcacacctgcaggcaggtacacaccgacgggacacacctggaggtaggcacccacctgcaggcacccacccacaggtgcatatatccccccatgtccaccctctgcacagcccccttgccaggctgccctctgcacatttctgtttggtcccagactctgggtgaagggatcacctggtgccatcatcagtctatcaccagccctcagagaagtgcctcagcaggaggcctggcagaactgtgtgaggctgcccagcagcacagccccgggtacacagcgtggcatttgatgagtacagctggaaatgaatgagcagaggcaccatgaggacatggtccaggcacacatcaaaggcggtggccagaggccgcctggctccccatcagcaggagcttcagccctgcctttgggtggaggcccacagagccccgccatggaacacagaatcagagtctgcgtgggggctgcgtccaccccatctgtttgcccagcttctctctctagcatgctcagaccccacagaggcgcagggctccttcgcctccccaggggttggggacccctggtctggaggaccagtggggacagtgtctgctgcggtgtgatgtctggcagtgaggctggggacggcgtctgctgcggggtattgtctggcagtgaggctggggacggcgtctgctgcggggtattgtctggcagtgaggctggggacggcgtctgctgcggggtattgtctggcagtgaggctggggacggcgtctgctgcggggtattgtctggcagtgaggctggggacggcgtctgctgcggggtattgtctggcagtgaggctggggacggcgtctgctgcggggtattgtctggcagtgaggctggggacggcgtctgctgcggggtattgtctggcagtgaggctggggacggcgtctgctgcggggtattgtctggcagtgaggctggggacggtgtctgctgcggggtattgtctggcagtgaggctggggatggtgtctgctgcggggtgttgtctggcagtgaagctggggacggtgtccgctgcagtgtgatgtctggcagtgaggctggggacggtgtctgctgcggtgtgatgtctggcagaaagagccggggccagtgtggctgtgagcatcaggcctgaattccgtgaactgaggaacagcctgacagagggacccagcagcagcggcctcaggacaggcacaacggccacttcccggcttaacctgggcagagagacgagagccacttcccggctttaacctgggcagagagatgagagttctgtaatttttgaagattgaattcagtctgataaataattcaaagtacattgcctgaccccattaaaaaatggagttcaaatatgccaaatttttaaaacttcatccattggctgcacaaacaggaaagtgggctccagtggccctggctggtggttcagatgccgctgtggggccggccttcaggggtggtggggtggcccagctgcctccaccccagctccctcccacgtctacatccaagatgtctggcttccactttccgtgtcactaaagggcggggaagctgcaggggaggtgcctcatctgcagcgtcgtctccagtgactggcacctcagacagccccacacccgcggcaggtcccgcctggcactcgggaagctcttgcatttaagagatctagaaatgttgacactttgcgtggaattttaaaagctgcttaatcaggaaggagccagtcaggaaaagggacctgccaacctgcttgttagccgagcagcgaggcactgtgagcacacgggatgatgggtgctgggtgctggagttgaccggctggcccggcagagctggttcccgcggggaaccccgggggcgtggtgctcacagcaaccttgttagaagggacactggggagggtgtgtgctctctccatctggagccgcctggaagccagggagcatgtttttgtgtgagtgttgattgtggacaacgcccagaccctgcctgcagcacagaggaattccaggtgtcaaagcgataggaattcagggagatgatggacgtgggctccacaccccaccttccacctcaaggaggtggcagtgggaacccttacacgggggtgactgagcatctgagcgggatcaccgtggcctgggggcctgcccctcgcccctgagagctcctggttagagccgttgtgggcacagcctaagcttctgcaggccttctctctcacctctctcatatccttccatcatttaagtagattaaactcagaaacatttttagtgctgtgtacaaaccaagggcagcaaaaaacccaacctctatgccaggctgagcttctgttcttcctgactctacagcaagagctctgggcatctctccacgtgaccagctgtgaccacggacttaggaacactgtttcctacctccttcacctcacctccctgccacctccagcccgtaatttagagagaagctgatgcagttgactcttcccagcttgccatttaaacgcacactgggttatgtgcacagagatgctgccccagtgactgtatttgggtaactgtttcaccctcgtggtgtgacagcccatttgagcgctcttcaaggcacgagatcctcagcaccgtcaacaagtctgtgtctcacctgcaatcacagctcattgagccgccagctaattagagagcccctaagtgaatcagtgacacaatgccgcctgcaaaagcatcagagccgcggccgcacgcacacagagcggggtgtgagatatcccagccgcacacacacagagcggggtgtgaaatatcccagcccagacgcgtgcacacggggcgggtgtgaaatatcccagccgcacgcacacagggcgggtgtgaaatatcccagctgcacgcacacagagtggggtgtgaaatatcccagccgcacgcacacagggcgagtgtgtaatatcccagccgcatgcacacagggcaggtgtgaaatatcccagctgcacacacacagggtgggtgtgaaatatcccagcccagccacaaacagggcgggtgtgaaatatcccagccacacgcacacagggcgggtgtgtaatatcccagccgcacgcacacagggcgggtgtgaaatatcccagccgcaggcacacagggcgggtgtgaaatatcccagccgcacacacacagggcgggtgtgaaatatcccagccgtgtgcacacagagagggtgtgaaatatcccagcccagccgcacacagagagggtgtgaaatatcccagcccagccgcacacagggcgggtgtgaaatatcccagccgcacacacacagggcgggtgtgaaatatcccagccgcacgcacacagggtgggtgtgaaatatcccagccgcacacacacagggcgggtgtgaaatatcccagccgcacgcacacagagtggggtgtgaaatatcccagccgcgtgcacacagggcgggtgtgaaatatcgcagccacattgttgttgaaagccgttgccgggcctgaaaatcgcagctttttgaacgcacacactgaacctccccggctttgttttctaggaaggacgtggcggctgctgcccaactttgaacggaggagcacaggaggagctccaaggcccctcaggagtcgccactgttgcctccggtcacccccaccttctgttggagtggccttcagggaaaatgccccaaaggggcctcctaggagcccctgcccgaccccgccccagatgctccctcccatcgccaaacctcgtctcctcatctatggaaggagaacaaggagacggccctcacctagcagtgtaaccctgaatgccaaggccatgcctggtgcagaaaggcccaaacaccagcctcaggaggcgcggccatccccgtcatcacacctggtttctgctttgacctttgctgccaataaatgtgagcagctgccatcctgtgcccagtccccggggcatacctgcagcccaggctggctgtctttgcttcccagacacctgggaagtctgggctctggggaagacattctgcagctctaattttaaaactatttggcattttcaaatccagttttcaagtccctggggtgggtaaaggatgcttcaagaagaaagtgctctgagccagagtaggaacaatggtgaagggtccaggatggcacaggacgggagcctgccaggtggttctgccagggcccaggaggacagcaaagtcagctgacggctgggaccaagagacagaaacagagagacagagacagagagagacagagacagaggaacagagacagagagagagacaaagggagcaggagagggacagagacagagatagaaagagacagagggatagggagtcggagacacagagacagagagagacagaaagagacagagagagacagagagacagagacatagagacagagaaacagagagacagagatagagagacacagggagacagagagaaagaatcagagacagagatagccagagaacagcagagacagagtcccagcagttgcccgtccactctctgcctgacctgcaatctgcctcttctgaccttggatgtgccccaaccagagcttttgcaggaggggctgctcactgtggaggggagcccagagctggaccatcaggagacccaggacagacgccccacagcaaaagccaggacacctgaactggtcaggccagcagtgactcagggcctggagagccccgtgggcagaggctgcctggaaggctccaccggccaagggcaggtcagcaaggcaagtcatggccagaaggcagaagggccagcacaaaggccagctttataggtgcagagcgggagccaggcgggggcactgggagcacaggcatggttctcggggtgaggacgcctccttggccccactccatgtcactggtgactggtcaacaaggtgcaagctgctaccttcacagagggtgatcctaccggagacagatgagcctcactcactggccataacgtgcccccgaccccctggctccctctgcctatgaccaggccaggccccctgcagtgggtgctgctatcacaattgagggctgaacaccccaggggaaactgagtcctttcagggcagtaataagggaaggtttcgaccactgttagctgcagaagggccaacccctttacctggctgtccctctccctgggagcttgctgggccacccctctactgggctgcccctctccctggggtgccttctctacctgagccgtcttctccacctggaccaccccgtccacctggaccacccctccacctggaccaccccctcacctggaccgccccctccacctggatgaccccctcacctggaccgcccccccacctggaccgccccctccacctggatgaccccctccacctggaccaccccccccacctggaccaccccccccacctggaccacccccccacctggaccacccctccacctggaccaccccctccacctgggcctccccatccacctggaccacccctccacctggacggccccctccacctgggcctccccccaacctgggccaccccctccacctggacgaccccctccacctgggctgccccctccacctggaccaccccctccacctggggtgtgccagagggagtaactgtgggatggaaacaaaattcgactctagtgggtggccaggagaggtcacgtgctgcttctcttgtgttgtgaatgcagcggtcagccgcaaaacaccaaatgacacccagtcactggaattcttggattaaatgcttttgatgcacatatatcctctccacacactgcataattaactgaatatccgacaatcggcagatccatactgttgaagctggactagccacaacttatcattaaagtattcaattacataatttataatgaaaagccacaatcaacgctaagcaataccaatggtcacaattcatcagggtccttcccaaaactgtgggactctcagcagagtccacatgcacgggacgggggcaacacagccaagccccatggggcaatccagcttctctgcagacactgctggcttttagtttgtgccaaattttaataaacgttaataactcacttgataggtgtctcagcccatgcaggctgctataagaaaataccatagcttgggtaattgataaacaacagaggtttctttctcacagttctggagatacccacagattcggtgtcggtgagcgcccactttttggttgggccttcccctgtcatctcacagcagaaggggtgaagaagcgtcctgaggcctctttcagaagcgcattagcccatccgtgaggctcttcctcagggcctcagcgccttgcaaaggcccctaacaccatggccttgggtgaggatttccatgtaggaactggaggcgtggggtaggcggacacaaaccttcagtcgctatggcaattgtgactaataagtaatttgtacttatatacaaaaatgaattcgtttgacattcttttagggttaaaagctgcaccatcaaaagacggtcaggttgttccctcctcatttaagccaattttaaaacgatttttcctcctacaacgtgaaaatgatcacagggtgccatcaggtgactatgcacacttcgtgctgagctggcagaggagggtctagagtgaagcccatctcaagccaagtggaactggtccaaatggaaaaacagccccccgggacgtcttgtcttcggagagccgcgtctccggggcccgggcaggccctgtggtctccctgcctgggctgtacttgctcagccttttgcaactgcccggtaccaacggtcaaggatgagaattgcagcagagctttaaagacttgggtcccaacgtcactgtctattgactgagtttttcaagtggtttgagtcagaagtagggatataccttcaattagagtcctgaattttaggcattacttaccaaaaacactgagcaggtttgcccagaaaatacagtctgcatggaacttccacatcccctcactctctaccagaacggcagcccacctcaaagacaccgcacgcggcccacctgccttgcaccccagacaccagggttgaaagcctgagtccaggcaggagccaacctcacagagtcaaatctcggagcaccaggtgaggggaggtctcagcgccactgccgggataagccctcaggatggagacagtcgcatctgccagatccctttcaccagactgcagagtgaggtgaaaccagggcctcataggtgtgagggccatcggggaggtgccgccggcagaaggagaggtgggaaggctgagtggatggaaggatcaggaatgaccaggaggaagctacagtcaatagctgatggggcttggctgtgttgccccccagcccggtgcatgcagactctgctgacagtcccacggtttgggactctcgtttcactcattcatcatttattgagcatcagggaatatgaaagtggccatgggcctccaaacagctcagaatgtaaaggggaagagctctgtgctgtagctgcaactccagccacaaggaagacaagacccagggctgtgggacgaaggggagagaggactcaggccccagctgcaggattcgagtgcccttcgggagtgagctcgcaggggaggaaccctcctaggacagggcacgtggagctccaggcagcctctccagggccctgcgtgtgctgtttctctgtcttgaaaatgacaccgaacgtttatggccagtgagcacccaccgcaagcccacactgtgagctccttgcctgctggggaggccaggagatgcagaaccaagggcagaagcactgcctgcagccctgtcccagcgtcgtggatgcagacacgggaggagccgcagacagacgcgggaggagccgcagacagacgcgggaggagccgcagacgcagggggagccgcaggcacagggggagccgcaggcacagggggagccgcagacagacatgggaggagccgcagacacggggagccgcagacacagggggagccgcaggcacagggggagccgcagacagacatgggaggagccgcagacacggggagccgcaggcatgggggagccgcagacagacatgggaggagccgcagacacgggaggagccgcagacacagggagccgcagacacagggggagctgcagacacaggaggagacacacaaggagccgcagacacagggggagccacagacagacatgggaggagccgcagacacggggagccgcagacacagggggagccgcaggcatgggggagccgcagacacagggggagccgcagacacaggaggagacacacgaggagccgcagacgcaggaggagccgcagacagacgcgggaggagccgcagacacagggggagccgcagacacagggggagctgcagacagacatgggaggagccgcagacacagggagccgcagacacagggagccgcagacacagggggagccgcagacacaggaggagacacacgaggagccgcaggcacagggggagccgcagacacagggggagctgcagacagacatgggaggagccgcagacacggggagccgcagacacagggagccgcagacacagggggagccgcagacacaggaggagacacacgaggagccgcagacacagggggagccgcagacagacatgggaggagccacagacacgggagccgcagacacggggagccgcagacacagggggagacgcagacacaggaggagacacacaaggagccgcagccacagggggagccgcagacgcgggagagccacagacacagggggagccgcagacacagggggagccgcaggcacagggggagccacaggcacagggggagccgcagacagacatgggaggagccgcagacacggggagccgcagacacaggaggagacacacgaggagccgcaggcacagggggagccacaggcacgggggagccgcaggcacagggggagccacagacaccctcacactccgggatctagcgtgtgtggacgagcccgaggcgctcggcccagcttgtcagcagccttcctgggaacgctgtggaaatgtgtggaggggccgcgtggcttcctgctgcctgggacgacattactgcatctgcatttgaggtgtggggcccagaggggctcaggtaccctacggggggagtcaccccatgaccaggaatcacgctgtggccacacacagggagcctgactgcagctttctggaggagaacgtggttgcatttcacatagaaacacaggtcattttgtttctgaagaattcattccgaatatttatttgctacttgacaaagaagagacttcatcagggataagatctcgacaaagaccatctcctggctgccttttatattcaaatccaccacagatcaactcctggggcgtagcagagtcctgtctccccccaaaatagggagcactttctgattgtggggttcaaaaagctgccttctgagggtaaagggtgttcttaccaggaaagaggagacagaacaatgaagtccccaggggccggcagcagtgccgaggagccccggggaagagctcaagccagtggccaagcctggaccagcctccagcagggacagcaccgtggctgtggggacagtggggacagcgcctcggggccacagagacgtgctccctggacgttggcccaggtgcctgcccacttcctcggagggcctctgaacaagctgcagggctgtctccatgggaaggcgcgcacctcctcacgcctctccagggaagccacagcttcactgtgctggcagacccactctgttttttctacattgcctagagttcggctatttttctcttcccaaagagcctacccagcaaattttactggacaaagtgcctggaacaaagcagccaacaataaaactggcgtgcaccccatgaataaaggcgtcgcccagaaaatgctctaaattaggatttaattgctagaaattactttcaattacaaaaattgcaataaattacttgttgaatagacacattctttcaccaccattaataatttaaaattgctaattgcacgtaatcgcaagtaatttttgttctttggtgagaatcgaggtactacgttatgtggggtgggtttgccagggctggcccccaccctgcgcacctccacgtgtggcaggcagagccgaactcccagaagaagagttgcagtgatggggcctccaccgccaaagccacggacctggtgcagttcataaggtggcctcctccctccatcagcccctcagggacaacaggtggccaagggggtgaccttcccaaggagctggtccctccgccatcctgagaacagtgaatttgtatttgcagtaaaacccagattctccagaaaacgtcttgctgtcagcatccccgccgccttacacgtgctatggctgccctctgactctgctgcctgacttttatctgcacaaatcctacagtctcctgggagcccaccggtcagccagctgcctccaggggtgcgtctcctctcagcttcctcttccatctgaaccttccctccctccccaagtgttcgtcccttgtccacctggaaagcctctctgcccttgaagcacagctcctgccctggccccggcaggctgtaaggtagcacccccacatcccggtcctggtagcacccccacactctggccccaacaggctgtaaggcagcacccccacaccccggccccgacaggctgtaatgtatcacccccgcaccccggccccgacaggctgtaaggcagcacccccacaccccggccccaacaggctgtatcaccccccacaccccggccccgacaggctgtaaggcagcacccccacaccccggccccaacaggctgtaatgtatcacccccacaccccggccccgacaggctgtaaggcagcacccccacaccccggccccgacaggctgtaaggcagcacccccacaccctggccctgggcagtcgtggtgaccgcatggccttgttggtagcttccttctttattaacttggccccatttattaaccaccagcttcctgagggatgaaaccatgcttccagcgtttccaggcccacacagcactgtgccaggggctccagggaagctgatggatgtgggtgctatgacaccagctgctgcggggccctgatgccatggctgggaaggacgtcggcctggggacgctcagctggcaggatatgcctccccaggtgtgcgggcggcctcctcgtagtggaggcaggggcggagggtgcgaggcatgccactgtgagctggggccgagggggccatatgctcaggtgctgtctatcagctctggagggagaagccaaactctcaggcagcccacagcggggtgaggaccgggctccgtcccctctaacagggtggggtggggggcactgactggtcggaccctgcaagatccccacgggcaagagtggctgatcagagctccatgaacagccccttcgtcagaagccatcctctcacacacgtgcacacacacacacacgtgcccgcacacgcacacacgcgcacatacacgtgcacataaacatgctcttctcacgtcgcagtggatttctcttgcactgttgctttaagaactgtcagagcggtgagatgacggcagcctgtgcgaatcggcctccagcctcctcggggtcctgcccactctgttcgccattcggtcccacacctcagccacaacgggcagtcagggcttcagccactccacgggcaccaatgctgaagaccacagaggaatgtgctccagacggaggaggccgggcccaggcctgatggagacacggacgtttgtacctgaagccctcaagtctgccctataaaggagatgaaccctgaaaacactgacccctgaaatcagcaagaggaggcggctacagtgccaggacctaacccgcgctctcccaagtctcctcctcatcacacagctcccgaggcctgccagaagcaccccttgaaggcactgtcagggccttgccacactgctgcacgaggtgcacacgcaggggctgggacatatagctctggccttgcctccaagtctgtctccaaaacaatgagctggggaagagaaactctgtacggtcctccctactcccttgcccggccggggttgtggtcaggccaccctgggaaagaggagcagcccagggcagctacagaggctcctcctcccacctggggagaggaatccgccttcagggagcagcccatgccctccctggcttctcctgtctggcatcacggctgcggcagagtctaagagaaaggctctcagccgggcaggaccaccaggcacacaagggggggatgggagttagaggtgccagccctgctcctgacctccctgacctccagcacataacagggaggccaggtccttgtctgacacacccagagaatcatcagatccaaggcccggggtggccggggaccaagtatggctcctatgagaaaacaggcgtctgcaggaggcctgagcctgccccaccagcctcagcacgtaacatgtctagaacattcctagagccagaaggatgtaggaacttccttccagaatacacttcccagtggacagggaaatgggaatcgaatgcagggaccacccaccacctgccaggggacctctgaccccagggaggaggaaacaaggtcaaatcccaagaccagcctgtgcaacatgatgaaaccccgtctctactaaaatacaaaaaaaaaaaaaaattcagctggacgtgaaggtgggcacctgtaatcccagctacgcgggaggctgcgggtgaaggtgggcgcctgtaatcccagctacgtgggaggctgcagcaggagaattgctcgaaccggtagcagtgagctgagatcgcaccatttgggcaacaaactgaaattctctctcgaaaccaacaatcaatacaaaccaataagcccagaacccacaacttcctgatgtagatggacatgttgtgtccggaattggtgggttcttggtctcgctgacttcaagaatgaagccgcggaccctcgcggtgagtgttacagtttttaaagatggtgtgtccagagtttgttccttcaggtgtgtccagagtttctttcttccggtgggttcatggtctccctgacttcaggagtgaagctgcagacctttgcagtgggtgtcacagctcataaacacagcgcatccagaattgttcattcctcccagtgggttcgtggtctctatggcttcaagagtgaagctgaagaccctcacagtgagtgttacagctcataaaggtagcatatccggagttgttcattcctcgtggtggatttgtggtctcactggcctcaggagtgaagctgcagaccttcgaggtgagtgttacagctcacagacgtagtgaggacccaaagagtgagcaccagcaaaacttactgtgaacagcaaaaaaacaaaccctccacactgtggaatgggacccaaccggtttgctgctgctggctctggcagcctgcttttatccccatatctggccgcacctacatcctgctgattggtccattttacagagagttgattggtccattttacagaggctaactggtccgttttgacagagtgctggttggtgcatttacaaacctttagctagacacagagtgctgatttgtgcatttacaatcctttagctagacacagagcactgatgggtgcatttacaatcctttagctagacagaaaacttctccaagtccccaccctcccagcagcccagccagcttcacctctcactggtactcgctgcaggactttgtggcccctagcccgggcactccaggcagcccaatgggagctcgtcccagacaaccaagagaaaaagaggggaagcgagaaagagacagagacccaccatcatggccaacgacccagggaagagggaatggcagtcctctcacgggatccagcctccaatcaagcccagcaggtgccggccagtcccacggagtgccaggcccgctaagcccgtgcccacccggaacctgcgccggcccacaagccccgtgtgcagccccggctcccatccgcgcttctccctccacacctccccgcaagcagagggagccggctccggcctcagcaagccccagagaggggcccccacagtgcagcagcgggctgaggggctcttcgagcccggccagagcagacaccgaggcagagaaggcgcccagagtgagcgagggctgctagcacgttatcacctctcaatgtggacttgaccccacggtgtgccaggtaaaataaaggtctccttagttccgtgaagacagtcgaggtctgtgcacttaatccagagccccggacggcccccacgccccaccgctgcccccgaacccacagagccccgcggcggcccccacgccccaccgctgcccccaaactgcaccaagacacagcagtttgctctcaagcagtttaaactcgtctaatgctttaactggcctgtcaaatcattgtttcacagaccgcataatatgaattgtgtcccttccatatctggaacaccaaatcctaaatccacagccttcaagcacatctggttttcccgggcccaatcggaaagcaggtcctctccggcctgaagctgcgaagagaggcagcagccatgagaaggtggctaaccccgtcgggggccatggctgcctaggggaggccggcagagcctgcctgggggtcggtaaggacgctggctttggtctgacaccggcagggagggacagcgacgagggcaggagccgcggctctacctgggaacgcaggatcatctctactctgacggctcagcctctgcacacaaaccatccttctgcgtttaattggtcctctccaggggatgttttttgaaactaggtctttgaagacctttcatagcagccctgagataccgggtggagagggcagatggagagagaaccaggagatgaaaggaggagccgagagagcctgggggagccggacgggtgcggcccgacactgcgtagagacgcggccgtggagtttctccaccgtcattaaaccccttttttgctgaggaacgtgttatcaattttaaaattttcccaaatgttgaacaatggaagtgttgtttgcagagagagctcaactgtctaaagtagagaaatagaaggtctcccgagactgaaatgacaaagatggaaagcgggaggggaggcctcacggcagctgtgcccagaaccagcacgctgtgaacaggcgccaggccctgcgccggcccacggctacacggtgctctggaaacataggctagcgagagtctaaagaggtggtgcaggctcaaagccatgtgctcgtcatcacagcttccatttaaatcttgagggctgggcgcagtggctcacgcctctaatcccaccactttgggaggccgagtcgggcagatctcttgagatcaggagttcaagaccagcctgatcaacatagtgaaccccacctctactaaaaatacaaaagttagccgcgcttataatcccagctgcttgggagagtgaggcaggagaatcacttgaaccggggaggcagaggttgcaatgagctgggatcatgccactgcactccagtctgggtgacagagcaagactccgtctcaaaaaataaaaatgaaaataagcaaatacattttgtgtatggtttaaaagcatataaaacagtagtagagtcatacacatactcctaaataacaaaggcaaataggaataccaggagtgcatgctttgtgtgttttcatcaagaacatagtcaccaaaatccaagcggatgggcacagccatttgcatgtaactttacagtataagagacattgtcatatgcccacagtctgctatgaagacacagatccagactggctaagagcacagaggtgcatggaaatgctcgggtgtgtggtgtgcgtggtgccctgcgcatttgtgctggctttgcacccccctcctgccacgtcccgtgcaaacgctcaggtgtgtggcatgcctggggccctttgcattggtgctggctttgcacccacctcctgccacgccccaaaccccaaggagtccaggagccaggagagcccaaaatccccatccatgctcctagaaaggaagtttcttgacaaaggtctgagtcaaccatgggtaaagccagaataaaccctgctagttcttttgaggtgtgaacagtctcagctactctgagccccgcataactcactttggtcaccagaggagcaggatttacagggtcaaaagccatttctccttccagaggctcccagctcaaagcccagccatcgtctcccagacattttgggtcgcatggaaatctgcctcttaagagacctggcctcctgtctagggttagagaacactgtgttcccagaagggacagtcaggcctcaggatcctctcctgagaagccctgaactcaagtcaaactgagcctgtgttaacagggtcctttgccgctaagaacccaactgtctcaggagtggctctgcctttttttttttttttcctttctattttcagacaaatcgtcactcagcatagtaaacccaagatataaaaaccaacaattgagtaactggtcttttccgtctgtcttgggaaagtagcttatcaaaagtaagatgaaaaaagagtattttattgttaaactctataatgaagcaactgtctttgactacacaatgtgggaacttgccagtgaatgtagaagtactgcggggccatgcgtcagaggtgtgtgggtctaggagacgcagatcaggagtctggcctggctcagatgtccacagccaggaagccgcgggcagagcagcggggtcgaggctgcggctgagtttgtgagctgtggcagccatacttactctgcagggcatgttgagttctgaaggagacagcactgctgaagtgagcacagcagcaggacagacggctgatccctccttgtgctcccacacacagcagcgagacacaaacggctcgtccctcctggtgctccacacacagcagccggacagacggctgatccctcctcgtgctcccacatgcagcagccagacacagacggctcatccctcctcgtgctcccacacacagcagccggacagacagctgatccctcctcgtgctcccacacacacagcagccggacacagatggcttgtccctccctgtgctcccacacacagcagcgggacacagagggctcatccctcctcatgctcccacacagcagcgggatatagacggtggtccctcctcgtgctcccacgcagcagcaggacatagacggctcgtccctcctcatgctcccacacgcacagcagccggacacagatggctgatccctcctcgtgctcccacatgcaggggcctcagctctcaggaggaaaacactcttgagagaagagaactgaggaaaggtagcgctgatgtcaggggaagacgcattcgacaacacgcatgaaaaaaaacacttcttgttacgttcatgccatgcttttgtattcgccacaataagaaaaccaagcaagtacttcagtcaggcggcagccgtcacaggtaaacaaactcctatgtgggaaatgaaccgaggctgtgagcctcaggcagctccccagacccccaagaggagagggagcagtgaccgagcaggccccgtctgcagttcacaccgtctgccatccgtcccagagcccagcctcttgtagccaagacggggcaggagacagagcaaaaccactgagaccaccactgagagggtaaccaggcttctcagtagaaccaggggcttgccgcagggacgggagctctgactggccacgtcgtggagtctgcagctgcccatggtggagggaatggcatgcaggtgacaaggacatagggaccttgctgtggccacccgccggggtcacagcatgtccacggcaccctgatggaagctttaatcatcaacggtgttggccgccaatggcataatgaccggacctcaccccacccgcagccctagtggacacgcccatgcaggtgatcagcagtgccgtggcagccacagagacaggccaccaccactcctcaggccactcaaagccaccagcccctccctaatggcctcctgagcaccagaaatgcagaggggtgacagcatgtctcagaacacactgtgagcacagacctagaatcaccacgtcgttcagaatcgccacctcacagagaagcaaacccaaaggcagccagcgtaggagccttttcctcaggagggctgtgtcctgctcctaaaacatttccagggttcgggcatcaagatcagatcacacgttaatcaatcacacgtttaagaacgcctgaaagacatgttcatagctatattcgatgtcgttggattttccaacatggactgatgctcttcaattctctcaagcgcgtttacacacacacttgtttgcctgtgtgtttttgtgtccaatgtgtgtcgtgcacaggtgcaatccaagtgtgcaccggactcacaagactcagtattggcagcgtcctacatttagagagaatccagacaaacagctggtgggcactgggcactgttgtgtgccaggaactctccgagtcagccaggcactgggcactgttgtgggctgggcactctccaagtcagccgggcactgggcactgtgtgtgtgccaggcactctccgagtcagtgtacatgaatgcacttggccctcttgatgctctatgagtaagtgctgctgggacacacccatttcacaggtactaaagctgagacagagatccactctgcaaacccttgcccagtgccactctggtaataggaagagtgagaatttgagctcaggcagagccactgtcggtggttttgacagaaattatggactctttctgaacttcctaatgagaatttaggaggctctcaggtgccccttcctgtcccactccatagtttggcgtacggactccgcttattcctgaccctccctgccatcccacctctgtcccctctacccacacctcccgcaggaaggcattcccacccagctcctctgcccgcatccaatggagtgagcaggtgcaggcgatgaatgtactatcaccaataattttggaacttctactacatatgtgtatctaccacatgctgcctgagctcgttgagctggacttttaaagcagcagtgcctcaatatgcctggcctggctggcacacgccgcctgcctagattgcatagggtgagcagtctgcctgtgcccccacgagcccggctgtgcccatatgctgacgttatcctccactgggtacaaaaaggatgacaggaaccctcctcatcacgctcgtcatctcagtaattccctgggagcttttgtttgttttttgttttgtttttctccctgcatctgtcttgctgttgctctcagtggaaaacatacaatatttctgacgtgcccaggctttgggccatgctgcaaatgtatcctgccattgtgaaatgaccttcactgcgctcctgcccagaatgtgtgggaagaaaagggcactcgcggtcccatgggccaaacaaaagagtggtctgggggatcctgtgctatgtagggacaggagaaggtgccaggactcctggtgaacaagacattccaaaggccaagcattgctaactaatgcaaggctgcaggagagaccagcaaatgacaatagccactctcctcagaaggacagggatgtgcccacgccggcttcaactctcccgcccaaccccagcacaagcagagctgagcgctcaggtcctcctccatccatgctgctcctgcaggcgggccccaggaggctggacctgctcttgcctgggtacagcaggcagctgagccccctcctctgacaccagcatcctgtgtcccagccctgcctccacagcttctcctcatcaggcctgccattcccacaccacagagcatgctgctgtaagaggccaggtgtgaagagcccttatgctctcaaccttgtctgatcagggtggaatgaggagtggaacagcgtagagcgcgggctgtctatgtcagctacaccggctaactccggcaaaacctcagtccttgggttagggagacaggtgacaaccccattcgcctctgagctagggaagtagagatgctctatacctgtgtccacacccctcagaggacaccaaaggtttcacagagagagctccacacacctctgaggttggatccagccacacagaggtgtctgctatgcagcaagctaaacacaaccaattcctggtgttgggattaacaagcagcagggcagaccacgagaatgaacatttatcaacagccatcgggaaacatgccctccagctctcacatgttctccaggctccctgggcaaatggagtcctaagtattttatattttttgagctactataaatgggattattatctgatttctttttcagacagttcattctcagtgtataaaaatgctctttatttttgtctgtggattttgtatcctgcaaatttactgaatttattagctctaacagtgtttttggtggcatctttaggattctatatgtaagatcatgtcatctgcaaacagggacaattttaacttcttttgttccaatttggatgccttttgtttcttccttttgcctaattgccctggctaggttttgcaatacagtgttgaaagaagtggcgagagttagcatccttatctggttcctgatcttagaggaaaagctttcagcttttcaccattgcgtatgatgttatctgtgagtttgtcatatatggtctttattatgttgaagcacatcccttctacagtatatctaatttattgagtgtttttattatgagaggatgttgtgttttgttgtatgttttttatacatctaatgagatgatatatggtttttatccttccctcaatgtggcatatcacattaatagagttgcatatattgaaccatccttgcataccagggataaatcccagttgatcgtggtgaatgatccttttcatgagctgttgaattcagtctgctggtattctttcgagggtttttgcatctatgttcatcagggattttggcctgtaattttcttttcttatagtgcctttgtcagctttggtatcacggtagtgctgacctcgtaaaatgagtgtggaagtattcctcttcttcagttttttggaagagtttgagaaggatgagtattagtccttctttaaatgttaggtaagatcagcagtaaagccatcaggtcctgaactctttttatgggagactttttattactaatcaaatctccatatttgttattggtctgttcagattttctgtttctccataatttttcttggtaggtatcatatgcttagggattttccatttcttctgggttatccaatttttggcatataattgttcatagtctcatggtcccttacatttctgtggtatttgttgtaatgtttcctccttcatttctcattccacttgacttttctcttttttcttagtctaaaggttttcaattttgtttatcatttcaacaaacaaactcttagttccattgatcttttctattgtttttctagtttcgatgtaatctctttctgttctgatctttattatttctttcctattagatttaggcttagttagttctttttatagtaccttgaggtgtaatattaggttgtttatttggattctttcttcttttctgatgtaggcatttatcactataaacatccctcttagacctgcttctgctgcatcccataggttttggtatgctttgtttttatttttatttatctcaagagatcttttaattctctttttaatttcttctttgacatattggtggttcagaagcatgttgttcaatttccatatatttgtcaattttctgaaattcctcctgttattaatttctagtctcataccaggatgttcagaaaagatgcttaatgtgatttgaatcttcttaaatttattaatgtgttttgtggcataatgtgatctatcctggagaatgttctctgtgtttcagaagaatgtgtatttgctaccattatatggtatattctgtatatatctgttatgtccatttggtctaaaagtatagtttaagactgatgtttccttattgattttctgtctgaatgatctgtccattgccgaaagtgggtattgaagtcccctactgctacattacagtccatctctctttcttcagacatattaatatttgctttacatacttaggttctccagtttttagcccatatttataattattatatcttcttgatgaattgacccctttatcactgtataatgactttattttacagtttatgacatgaagtctattttatttaagtatagcacttctactctcttttggtcttcatttgcatgaaatatctttttcatcccttcgctttcagtctatgtccttaaaagtgaagggaatctcttgtaggtagcatatagttgggtcctatttttcagccattcagccactctgtcttttgattagaaaatgtaatccatttacattcacagtaattattgacaggcagggtcttactaatgccattttgttcattgttttctggtattttctaagtcctttttcctttcatcctctgtgtctgtcttcccttatgattgggtgattttctctagtgatatgctttgattccttactttctatctttggcatatctactaaggtttttgctttgtagttaccatgaggcttacataaaaatatcttacagttatagcaagcttttctaagttggtaacagcttaactttgatcacatttttaaaatctctacacatttactccacccaccccacgcataaactttaatgtcacaattcatatctttttgttgtagctattatttaagaaatttcatagctatcactgtgatagttttctctttttaccttcatgctaaagacttaagtgatttgtacaccaccattacagtattattctgaatttgactgtatacttatttttatcagtgagttctatacttttgtatgttttcatgttgctagttagcattcttttctttcagcttgaagaactctctttagaatttcttgtaggacagctctggtggtgattaatccctcagcttttggttggctaggaaggtcttttcctctccttcatttctgaagaacagctttgccaagtacagtattcttggttggccatttttttccttcagcaccttgaatatatcattctactctctcttgcctatagggtttctgctgagaagtctgctataaaccttcctgtaactcctttatatgtgatttgcttcttttctctcactgcttttaagatcctctttgtctttgatttttgacagtttgattataatatatctcagtatagtcttatttggattcaatctaatcggagacttttgatcttcctgtacctagatatttatatatttccccagaattggaatgttttctcatattatttaaatatgctttcagtcccttggtctctcttctccttcttgaatacctgtaactcaaatatttgatcttttggtgttatctcacaaatcccataagctttcttcattcccgtttactctttttctcctctgactgtatgttttcaaataacctgtctttaagttcacggattctgtttcatcaattctgcagttgacactctctactgcatttttcatttcatttattgtgttttccacatccagagtttctagaatttttaaaaaataatttatacctctctgtggaatttctaattgcagtcatttactgttttcctgattttattgaattgtttttctatattttcttgaagttcatgaacttccttcaaacacttactttgaattatcgggccatttgtttatctccatttctttggagtctgctgctgggagattattgtggtttttggtggtgttgtgtctccttggtttttcatgtttgttgttgttgttgttgttgttgccttacgttgatgtctgcacattttgggaagtagggacttattctattctttgtagaatggcttcgcctgggtaagcccttcatcaataagcccatgcagattctgggcgtcatctggcatgctccataggtaggcttgctattggggtcctcacgcaggctggtccaatgcctgggttagcaggtgagtgagccttggcctggatccactggagtggacctgttgattgagtctgcaagggtgaacttagagcctggcatccgttaaggcaggactggtgctagggtaggccatatacctgagtctgaaggggctgtcctggggctaaggtgggcccagagcttgaatttgtgggggtgagcctgggtcctggatccacaagggttggcctggagcctaagtctgcagaagtggtcttggagcctctgtccaaaggggctggctggcaccaggggtctattggagtgggcctggactctgagttctggagcctggagcactggggaccagcctggatcctgagtccacagggacactcctggagcccaggtcagtgagggctggttcagtgctggggcctaccaggataggcctgggtcctgtctgctaaccatggagctgcagggccagcctggtgccagagatgatgtggagcctgaggccaatggggtcaacctgtatgcggagtgggcccagagactaagtccactgggcaggtgtggggcctgggcctgcatgatcctacctggtattggggcaggcctgaagcctccgtccttgggtaccagcctggagtaggaagctatgggggcatgtctggtgctgggtttaacttggttggtgggggatcaggaggcagttttagagttagaagcaaagtctggtactcacttctctttccttcccccacatagagggcatctctcaccacaacatgctgctaggcctgggtgagaggggacccagtcatgcaaaactgttttttctgccttttcagtgcatcttatttctgtgccatgcccaggtgctatcacctctcacctggtttccttagcacttgtgaaggtatttttgcacacagatagatgttcaaattgttgtttctgtgatggatgagcaatggagagtcctctcctgctgccttgctgatgtccatctctgacgaatgttgactatgtgactctctttaaaatattcagggaaaggagcatctgattctttaagaagtcagcagataaaatgtggatgctctttgacagaggaggaggaggtctgctgagccaagagcaggatgcagagatggggcatttctgctctggggtggggagttgagaacctcatggcaggaggagtttccaaggcttgccttcattccaccccacttggtgatgatgtaacagcttccatttgtgtttcacagttttcaaaatgtactcaccaggatcaacccacttggtcttcatgactcttttgatgtggatctagctgtgttgctttgtattattcaagatgtctaatcattttcacacttgagggttctagggatttttctgatactatccactcttcccttgatatacaaagtcatatgatacagaatcacacatatttgttgatctggagaaacaatagggatatgaggatatcatttattggaatttatattttgtttgggtttttttagtctaagctctaggagcttcccctcccccaattgttataaattaactagattttggttgatttctaatgttttccaaaaagtgtttattcattggtttttgtctttaaagttaagattcactgggtaaagtaaaatagagttctgtggcaagaaacaaccctgacagatgaaactgaccctggacagtgctgctgtctttggttgtctgacttattacttctgatttgtaataatttctgaggctgaatacagtgttaaatgaaattccctgtctgcaccaatgttcctgcactttgtaactcgattcttgacttcaaataaaagtgacttcttcatatagctttgccatttactcttagagccagctaacactaccagaaccctaacaaaatcacaagaaagtttaactcaagaagagagagatgaaagagggagagaaagaagaggggagtgtaaaagccatttccaaaacaagaggcccagacatcaatttgtaattatctgcccacatgagtctaaaggcttttatttgataaggccagtaatacacaagcctgtaatgtgaattatttcaaagaataaaagcctgattgtctccatgacctgtctagcttttagtgaggcttaagacaagattacattccatacagcccgcaaatggatccctcctctccccaccttcctgcttctttcagaaatgccagggttttctgtgctgccatctggtaagcttccagttccgataggtctcaatttcctcctctgttgagacatctaattctcctgagggtgacggttcttccttgtctgaaatgaagcttctattaaacaaagactgcccctattccaggatgttcaaaagcagatggagcccgcctcctggtgaggcttttccattaacactaaagaatgccctaaatcaagcttttcagttttaaatagggatgaagtctaactgacctcatactttaaaattaaaaggtaaaaactgtgggttgcatcagaaaagaaaatgcaagcttttaaagcattcacaggtaagccatgtagttttaatcctaagagtagtacagttgcattgcttaatggtaggggtacattctgagtaattcctcattaggtgatcctgtcactgtgcaaacatcacgggtgcacttacgcacccccagatgggacagcccgccacacacctgggctggatggtaaagcccattgtgcctaggctacaaatctgtcctacaagttactgtgctgaatgctacaggcaattgtaacacaaggttaagtatctgtgtatcatctatacattaaaaggtgcagtaaaaatatggtataaaagataaaaatgggccgggcatggtggctcacgcctgtaatcccagcactttgggaggtcaaggtgggtggatcagttgaggtcaggagtttgagttcagcctggccaacatggtgaaaccctgtctctactaaaaatacaaaaattagcctggcgaggcagcaggcacctgtaatcccagctactagggaggctgagtcaggagaatcacttgaaccacggaggcagaggttgcagtgagtcaagatcacgtcactgcactccagcctgggcaacagagtgacattcagtctaaaaaagaagattaaaatggtgcagctatatagagcactgaccatgaatggagcctgcaggactgaaatttgctctgagtgcatcagtgagggtggggtgggtgagtgtgaaggccgaggacattactgtacaccactctagactatcaacactgtatacttaggctacactaaatttataaaaatgttttttcttcaataataaattacctttaaatagtaactttgggctgggcacggtgactcacgcctataatcccagcagtttgggaagctgagacaggtgatcacctgaagtcaggaattcaagaccagcctggccaacatggttaaaccccgtctctactaaaaatacaaaaattagccaggtgtggtagtgtgcacatgtaatcccaggtactcgggaggctgaggcaggagaatcgttcaaacctaggaggcagaggttgcagtgagctgagatcgcaccactgttctccagcctaggtgacagagcaagactctgtctcgaaaaaaaaaaatagtaacttgtgtactttataaatgttttaactacttttaactttttcttataacacttagcttaaaacaaacacatagtacagcagtataaaaatagtctctttatatccttattctataagctttttcctatttacacttttcttccacttttaaaacttttttgttaaaaaaaaaaaaactaagacacaaacacacaccctagcctaggcctacacagggcaggctcatcaatatcactgtcttccacctccacatcttgtcccacaggaaggtcttcaggggcaatagcacatgtggggccatcatctcctatgagaagaatgccttctgccggcatatctcctgaaggacctgcctgagtctgtgtgagtgttagttttgctttttaataagtaaaaagagtgcattctaaaataatgataaaagtacagcaaatacacatgtaccgtgcacagctagactagactttcatacaagtgggagtgcagttggctcgtctacaccagcatcaccacaaacatgtaattcactgcactgtgacatcatgagggccacaaggtcagtcggtgacaggggttttcagctccactacaaccatatgggaccaccatcatgtacgcgatctgctgctggtggaaacattgttatgttgtgcttgctgtttacagtttctcaacatcacttgaacctacaagaatatctaaggaccttctgagacacaaaagcttgattctcaaatacataaaaataagaaggatttttgttttcccccaaagtgatgaaattacatgagagtttgttgttttcatgtctggctcccatattttttgtaagtttttcatgtaaattaaaggtttactctggcgtcaactattccctcctggcctggaatcacagacgttccatttcttccatctactcatttgggaataagtcacgtaattcccggccctcagctcctcaactgatatccctgagcaacagcatcagacatgcgtgtgcctctgacacaggaggatgcgagaggcagggctgagccaggccaggcaggagcaagcggggagggaggagtgttcccgggggagagtgagaggcaggaaagacatccagccacaaggagacctgggagcacgggtcgcccagaattcagtgtgcttctatttccacgctcatggttcacccacctttctgagggtccaagcccacggcacccgctgaccctgcctgtctgcccagacactgcaccacatcgtggttcacctgcctttctgagggtctaagcccatggggcccgctgaccctgcctgtctgcccagacactgcgccactttccacgcgcgtggttcacccacctttctgagggtccaagcccacggcgcccgctgaccctgcctgtctgcccagacactgcaccaccttccacgcgcatggttcacccacctttctgagggtccaagcccatggcgcccgctgaccctgcctgtctgcccagacattgcaccacatcatggttcacccgcctttccgagggtcagagcccatggcacccgctgaccctgcctgtctgcccagacactgcaccacatcgtggttcacctgcctttctgagggtctaagcccatggggcccgctgaccctgcctgtctgcccagacactgcgccactttccacgcgcatggttcacccacctttctgagggtccaagcccacggcacccgctgaccctgcctgtctgcccagacactgaaccacattgtggttcacccgcctttctgagggtctaggcccatggggcccgctgaccctgcctgcctgcccagacactgcaccactctccatgcgcgtggttcacccacctttccgagggtctaagcccatggagcccgctgaccctgcctgtctgcccagacactgcaccactctccatgcgcgtggttcacccacctttccgagggtctaagcccatggagctcgctgaccctgcctgtctgcccagacactgcaccactctccatgtgcgtggttcacccatctttatgagggtctaagcccatggggcccgctgaccctgcctgtctgcccagacactgcaccacatcgtggttcacctgcctttctgagggtctaagcccacggtgcctgctgaccctgcctgtctgcccaaacactgcaccactctccatccgcacggttcacccgcctttctgagggtccaagcccacggcgcccgctgaccctgcctgtctgcccagatgctgccccacatctccatagcacccagttgtgcactagcagctgaggtgagctgtcgaatcctcattttctcacttttcattttcacatcatcaggcaccttgtctgagatggttgcttagttaaataaacagaaagatgagtttggattgcttctgatatgggagatgggcagggaagtgctgggtggagaagggcgggtctctggcaagggctctacccctggacctttcccatgggcctaggcgaggacaggcatttttgtttttgtgcccaaatgttgcatttcccaagaccaccctggtccaccatgcctctatcctgtgcctataaaaaccctgagaccctagcaggcagagacacaagcagctccccaagaccctagtgggcaaagacacaagggctggatgtcaagaggagcacaccggcagaagaactcactgacaggcaccagcagactaggtagttggaggagagcctggctgctgagcggcccgactccaggggaaaactgccttcccagtccatctccctctggctcctgctgagagttacttccactctataaaaccttgcgctcattctccaagcccatgtgcgatctgattcttccagtacaccaaggcaagaaactccaggacacagaaagccccctgtccttgcaataaggcagagggtctaattgagctggttaacacaagccgcccacagacggcgaaactaaaaaagcaccctgtaacacacgcccactggggctttaggagctgtaagcattcacccctagacacggccgtggggtctgagcccacagcctgcccgtctgtatgctcccctgcaggtgggagcagtggggcactgaagaagcaacccactcctccatcgcacgccctgtgaggggaataagggaacttttcctgtttcacttcatctcaaccctcctgacccactctcttctgggtggcagttggcctttctgaggcagcagatggagccaagcatgtaggctgtggtcacagaggcacatggccacctggcccacaggaagaccatgggaagaccacaggtggacacgcccggcactcagggaactctaagggaggtggagcttgggtggtggagcagttggggtggtggggcaggagagaccagcagatgtggccgggggcaacatttggaatgtccatggatagcattccatccaaacacaaacgtgcgccttactagttcctctgcttctgaagcggtaacggtgaaaatcctgggagctctcaggatccagtcccggagggaccagcacagcacatatacagcttctgccaatggctgggcataagcttttaaaaactgatcatgtttcctagctacagaatgactttctcttcatttcagattgatcatcattcagagagagctgctaactctctggctttcagccgttctgtcctggtgttaacaatctgggaacctattctgaaatgtaccagagaaactctctgttcaaagggatctgccagaaaccctttgggaagggaagacgcccctggagccacagtgatgacactgcaaagtccgttcatttgtgatacggtatctccttgtggttcagcaaccctcagcccatgacctggtgagcttgacttgaggcttcattcttcatcagacacagaagcatcttgtcttgggaagggtcttcacgtacagccctcatttctcctttgactacaaaacccagcagtaaggaggggtctttcagagtcattaaggacaggtcccaaagaaatatggacttagtaaaaaatataatcaggtttcttgtaaaacagagaatggccaatgtttagaggttaagagtgctacaggtgcacaccacacgtgcctatgtttaaaataactaacccccatcctacctaaccacataccccagttatgctgttccctcacctctccacatatattttggagaatatcacaataggatggtttgtggacagaatgaatttcctattgtgaatgtggactactcttactgaagttacaaaacaagttgactgaaaatttaaggaatgcatgttttaatgaatatagactaactcaagttttctttactttttgagtcacttttatcaacttacaggttttttttctaattgccttttcaaatttcttagaacaaagtcattagtagtgttttcctacgattcttgaattcaatttacctatggtggaattccctttttcctctcattaattgtgtacttatgcccttttttgtcattgtcggtaaaaagagctctgtaagtcttttcaaagacccagagatatttctgctgtttgtgttcttgatgcttgccctcatttcttcgtacctatttcagtattttctgctcttgtcttcattattttcttctttttaatgtcttttgcttgctttgttcgtccttttattcttattatgaaacgtttcaggcacacaaaaaggaataaaataatatgacacaggttgaatatccctcatctgaaatgtttgggactagaagtgctttggatttcagatatgtttggatttattctggaatatttgcatgtacataatgaaatatcttggggacaggacccaagtcgaaacatgaaattacttgtgtttccttataccttatatagaaggcctgaaggtaatgttatgtaatttttaataattttgtgcacataacaaagtttatgtgccgtgaatctggaagaaaagaatgaagagcttgcgggggaggccacctctgaaggaatggccgagaaacttcccaagtgaaaaagctgtgaggcttcagattggaggagggcgcaagggcccagcaggatgtgccaaagttgtgctcgggcacatcaggaggaaatcaggccccacaatgtcacctccaagcacctcctggggttgcctgtcctctctcctcttcctgctgagcccctgggtccaaggacctcccaccttcaaaaaagtaaaaacagcacagcccagacccaggggtaaaattcatgtcatcacttcttcctgggccagcacccaaatacctcctgagccacaggaacacgatgcctctgtggccctgacagccactgccgattgtcctgggaggggccttcagggaaccgcacaggaaggagggtgcagctcagcccgttttcaaatccagcaggatgttcatgacctccctgcagacactaatggacagaacgtcacagcagtctggtgagcgatgatgtcagtgcattattaaattcaaactggaggggaagttttgacactaatcaatgctttttatcccacccaagactggcatattcccgagacaaatctcagtggttactgaatagcttgcagacctgggctgccctggggaaactgccatgcaagtctgtccttcccacctttctgcagatgcacgcagggctctcaggaagcaatttttttttttttttgagatggagtctcactctgttgcccaggctggagtgcaatggcatggtcttggctcactgcaacctctgcctcccaggttcaagcaattctcctgcctcagcctcaggagtagctgggactacaggtgcatgccaccacatccggctaatttttgtatttttagtagagatggggtttcaccatgttggccaggctggtcgtaaactcctgacctcttgatccgctggcctcagcctcccagagtgctgggattacatgtgtgagccaccacgcctgaccaggaagcaattttttttagctcattaacatggcaaagacagatagccagggccttctgagagctgtaaatgagcttctcacctctctgacagttttcagcagacatggattcctcagtcctagagctgctggctgcattcatccttcactgccacagagctccctcacctccctcaggaagtggcagagcagttggcggttcccaggccccccagggaagccctggcaggtgcttgctggggttgggtctttaccccagaacccagcaaaatgagcaccttggtctgggaggagaacgtccctgaaaggcccttggacagtattagcagctcaggggcaggttctggaaaggccttttccggttaacaccactgaatggttcatggggtcagagcaggcaaaacgagcaccatttcctcccaagaaacacatttttcccactgtctgacagttgaaaatatttgtttactttgtagaaacctaggatgttttggcagcaagcaatttatgtcactttgaaccacagagaatgcctctgaaatgatgatatgggtcaatgaagaagcaaagtttcttaactgaagtccatttcatagaaacaaatgcggaaatgattgtaattatgagggatgggcccactgtggcatttcccaatggtgacagtcaggctctacccctagcccttggagtcaaggccataaagcaaacggccaaaggtcccctcgtatcgtctgatccgacggctagggttggaaggtgggcagcctcacgggagcatggacctaggtagtcgccaggggcctgtgtgcagaaaaatttctcatttgctttgacacgctgctgttgctgtcttgaaattctcaaagattttatctcccaacctatattttgtgtgagacatcccatgaggcgacgtggtgcgcgcacctgcagagaagacaccccaatctgcacgcccacagcgcctcgcccgccacccagtcccgcagcgcctcgccccccacgtgtctgtctgtgctcatgtggccctaagaggccactcctctgcttacccagagcttgctgcaaaccacaaagtgcaacagtgttctaagaaacacaaacgaccaagggtcccaccctctctcccactcacattgctttcccacataagccaccatttatgctgaacgtggccgtgtggagggaggggaggtgggcagcccacagtccttctcatgtgtgagcaaaggtggagaatctcggtggacaggggctgtttcatgaagggaaataaacacagccgagtgagtttcacacagcatttccaccgctgtaatgagaatgaaatacatatgcatgtttgagctgtgacagatgaactatgtagttgttcagattctgcatgtgaattaaatgttctttcatttgcatttgaaaccagcaacgcacgatatacagatgaatggtaaccttcatgttaataattcaaaaatcttaatgtttttagaatgatgctgaatagcaaataaaaatcccatgacaagtcaagacggagattgtgaaaggaaacatcttatactataactagttcctttaggggcacttttccttgatttctgaactaaggacctgtatttgcactttgcacgggccgtgcaaattaaacagacagcattgcagggcatgaacacagacgaaccacgaccaactcagctgtcccgaggctctgtgttaacggctcctgacacactcccctcctccctgttctgatctgtttgcattaatatgcgctcaattgtaagaagctgaacagatgtatttattcagaattcccaagcagctaactagaactcccaattctgagtcatcgtcttagctcccgaggtgcttagcagaatgctctgtatttatcagcttcccggttaacctacacaccactccccagctcttgctggtttgagttatgtgaaccttcaacatcattagggaagcttctaccacacttagtactgataagcaaagtgcattcacacttcctgaggatttaatgagtggcaccatctaaattaatcttaagaacaatcccatttgctgggcgtggtggcccattcctataatcccagaactttgggaggccaaggcaggtgcattgcttgagcccaggagtttgagaccagcctgggcaacatggcaaaaccccatctctgccaaaaaatacgaaaattagctgggcatggtggtttgcacctgtagtttcaactacttgggaggctgaggtgggaggatcacttgagtccaggaggcagaggttgcagtaagccgagattgtgccgctgtattccagcctgggcaatagagtaagagcctgtctcaaaaaaagcaatcccctgtcccatgagatggtatgacctcctccaatctaggaagctattgattgcaagacagaccattactctagtactgctaaggaaaaacaaacccgctggcagttaaactatgatgtgctatttataaaagatgcctcctaatttcagtgatgggaaaacaatacacacctgagaaatgatgacattcagggtggtgggtactgtgacagccacactgctgcttcctggggactctgcatcctctccccagacaccagctgttgagggctaggggttagccgctgaatccctccccatcaccacctgagcccaagggaacagccactccctaagttacagtctcttgctccctggaggtgaaccaccatcagtgatccctcatgtgggacacaaaggcctagcccccagccttggttgggtcaaccctgaaggggaaccccagctccggctgcagagcacctcacaggatcagctcggtcctcttaaactgcattccagctcaccttctccctctgcccaattcagcttccctcacctgtacgggggttaccccagatcacccccagtcaccgactgcatgcaaatctctgtctcagagtttggtcccagcacattcaacctagggcatgtaggaccaccctcgtttcacgataaacaaccaaaacagggcagttacgtgatgtgcgtaagatggcacgactcacacgtgccgcagctggaacttaaactccatccggactccaaggccaccctgttgtctctccacaatcaatgctcagagcacagcctgcaactgtaagaggcccctaagctctttcaagtggtccatgaggccaaaactattttcataaaatactaagacatactttgcctttctcacgtgtactcttttatgagagaacttggaacagtccagaggctatgtggcaggaaatgacacagaatgagtgggaggcagagatgagaatccaagtgttttctgttaaatgaaacaatgagatatgcaaaagcgtgaaacaagaatgtaaaaatgtaaaacaaaaatgtcacacttagcacttttttatgttttggaaaatatagctactgtgtttataatgaaataattttatgatttattttaaagtgaattaataaacagcttttctaaagtgttggcaattttaatttctaaggtaacaaatgtggatagcactaacccaccaaaaaaaaaaaaaaaaattctttggagtcttcagtaattttcaataataggatgtgatcctgagaacaacattttaaaaatcacggctctgcactctgctgctgggagtttggaattccgctctccattccacaccagccgaaggaccccaggaacaccctgtaatccctctgtgattccgtctctttaatctgctaaataaagagatgtaacttccctacagcaaaaggaaagcaccagtagaattctgtaagttaaaactactgttaaaattttactgctctatactatatccagtattcccttctccattattctatgaaaattttaacaaaatgcattatactaatttaccatacaggattaaaatgtcattaagcttgcaatgtgtaaaccttaaaacagctggataaaaatttaagacaggaataagaagaaagccattcatattgttggtatataaaacaagcttcagagagtgttagtcccattttattcatggaagaaaataaatatgaagacactgaaatcacctggagaatttttaggagatgctgatggcaggcctcatatgagacaaatcaattcagaatctttgaagggtaagccccagacaccatggtttccgaggctcccaagttattttaatataacgtcagggctgacaactactgctcctgttgatgaagagggtcaaactctgaaaactatttgaagaaatgtattctgagccacatgtgggtgaccaatggcccaggccacagccccaggagagcctaagatcatgtgcccaaggtggatgggcttcagcttggatttctacacactagggaggcataagacatccaacaatacactaagatgtgcacaggcttggatttctacatgctagggaggcataagacacccatcaatacacataagatgtacacaggcttggatttctacatgctagggaggcataagacatccatcaatacacataagatgtacacaggcttggatttctacatgctagggaggcataagacatccatcaatacacataagacgtacacaggcttggatttctacatgctagggaggcataaaacacccgtcaatacactaagatgtacacaggcttggatttctacatgctagggaggcatcagacacccgtcaatatgctaagatgtacacaggcttggatttctacattctagggaggcataagacatccgtcaatatgctaagacgtacacaggcttggatttctacatgctagggaggcataagacacccgtcaatacactaagatgtacacaggcttggatttctacattctagggaggcataagacacccgtcaataggctaagacgtacacaggcttggatttctacatgctagagaggcataagacacccatcaataccctaagatgtacacaggcttggtccagaaagatgggaaaacactaagcagggtcttccagggcataggtgaattcaaagatttctgaatggcaattggttgagtttatctaaggactgggaatcggtagaaagagtgtctgggttaagataagggactgtggagaccaaggtttttattatgcagatgaagcctccaggttgcaggcttcagagagaatagatggtcaatgtttatcagacttgaaaaggtgccagactcttaattaattccctcttggatcagggaaaagacctggaaaggaaaagggattctctacagaatgtagacatttcccaggagagacagctttgcaagccatttaaatatatcgcagaaatatattttggggtaaaatacttccatttctttcagggcctgcaatctgccatgttggtaccttatagctgcaaaaggtctgctttgtctgtcttcacgcctctgttccaatgttaacgctggtcagctgtgcctggacaccaagggaggagggtaggataaggtgtgtccaaacaccccttcccatcatggcctgaactagtgtttcaggtttactttagagtgcccttggccaagaggaagggtccattcagctggctgggggacttagaattttatttttggtttatactctaaagccaagagtggcttctttccttcagtgcagaggaatccaacggatatttttaacaaggaaaggacaacagaaaaaatagggattcatttttatattagacaaaacatagagctaaagatagagggagagagggagggagggagacagtggtggagggaggtggagagagaaagagaaaaaaagatggatgtggccatggcagcattgtttttgggtattccccaattcccacataaaacagacggagcaactagacaaggaaatcaacaaaccaagatcacacttaaatcaaactgaagtgaagctgtccccagctagtgatccccaaggcgatgtccagatgaacgttgaggagaggaccagagaaaagcagccttaggaagtagctgtagacatcagtgaaaatggcaaagaaccttaaacattccctccttcataaaagcaatgagaaaaccacccaaaaatatcagaatcaacttttacagaactctggaaattaactaaaggctagcagaaatcagagcaatttactcaaaaaaaaaaaaaaagaaagaaagaaaaagaaagaaatggctgaatctcagcaagaacagcgaacttcctggcatcttaactcaccctatttccagctccctctcctcagctctgccacaggcttgaaaatgagcagcccacaatggcagtaaaaaccaacagcctggaagccaccagaaagcacagggtggggttagagtgccttcaaagccccattcccagagaattgtcactacttgacctgtctggttgttccctggaggacccactggaaaggctgtctttatttcatccaactcaaagctcacatatgtgaaaagtctttccctgggggcatttgttgaaaacatttagagacaatgttttacttaccagccacctgaggtagaggataatggttgggacaaacaataggctaaccagaaagcttgaaggaaaagctggaaaatgagatgtgcacaggtgctttgcaaagctctgacacgatccttggaatatggatggccacaacacatggagggctgtgtgcctgcccaggctgtgcacactcagggaagacatgaggctctaagctctcaccactggctgatgtagaggctctgggccagcatgaagtgaaggctacaacagagctgtgaactgcctgtctgatggctgaaggtatgccccacactcacacagaaccctcagcagagactgaggcttgtttctaggcatttaaggcaatctgtctggtcatctgaccactaaccaaactgagcagagacttggtggccacacatgatgaaaaaacacaaactttacagaattagttcagaatagtcactaagcaagcaaacaacaataaacagcaacaacaacaacaacaacacctaaggagagggaaattctggttttcaaagttgccacactatgttatttaaaatattgagttttactaaaaatttttgaggcattcaaagaaacatgcaaatgtgcctcttccacaggaaaacaatagaagctgttcttggggaagccaaatggcttacaagacaaagactttaaatgagctgttttttgttttttttttttttttttttttttttttttagacagagtcttgctctgtcatccaggctggagtgcagtggtgtgatcccagcctactgcaacttctgcctcccaagttcaattgattcccctgcctcagcctcccaagtaactgggattacaggcatgcaccaccatgcccagctaatttttgtatttttagtagagacggggtttcaccatgttgggcagactagtcttgaactcctgacctcaagtgatccacccgcctcggcctcccaaagtgctgggattataggcatgagccactgtgcccagactaaatgagctatttttaatgtgctccaaaaactgtaagaacaatgtctaaagagctaaataaaagtaggaaaatagtgtctcatcaaatagagaatatgaataaaaagatagaaattatatttcaaaaataattgaaaaattcagtacagcagctcaacagcagatcttagcagcagaagaaagaatcagcaaacttcaggataggtcaactgaaattatccagtctgaggaacagaaaaaaaaagaataataaaaaattagaaacctgtgagagaccatccaatgtactgagatacacgtaaaggaagtcccagatgtaggagaggaagaatgaggtagaaagaatatttgaagaaataatgacccaaaattcccaaaactagatggaaaacatgaatctacatatctaagacactcaatgaactccaagtagaataaactctaagacagccacacctagatacatcaaaatcagaccttcaaaacccaaagacaaagtaaatctaatgaaagcagtaagagagaagcaacttgtcacacatgttatggactagatatttgtcccctccaaaactcatgttgaagtttaatccctaatttgggagtatcaggagggaggaggaaactgggtcatgagggctctgccctcatgaatggattaatccactcatgaattaatgaattaattcatgtgggttatcacaagaggggacctggtgactttctaagaagaggaagggagacctgagctagcacactagcatgctcagcctcctcatcatgtgataccctgtgccacctcaggactctgcagagagtccccaacagcaagaagacccttacctgattctgcccctcaaccttgaacttctcagcccagatacctgtaataaataaattccttttctttataaattacccagtttcagatattctgtgataagcaacagaaaataggcaatgatcctcaataatattaacaactaatttctcatctgagactatgaaggccaagaggcagtggaatgatatattcaaagtcctaaaagaaaaaagtctatcaaccaagaattctatattcagaaaatcgatccttcaaaactaaaggagaaatcaatacattcccaaacaaaaaacaaagagaattttttccaacaacccttccctagcaagttctaaatggagtactttaggcaaaaatgaaaggacattagacagtgagttgtatccagatgaagaaataaacagcaccagtaaaggtcattatttagtaaatatgaaagacagaacaaatatttgagtatgtaacatttattttctcctaattttctttaaaaaacctgcataaagcaataattataaatccatgttgataaacatacaatctataaagatataattttcatgacaataacagcacaaaggagggaaagagaaaaaatgacagagagtgtttgaaaattaagttggtattaattcaactagattattataaagatcttaatgttaatttgaattaataattaaattaatattaacttggtgttaataaaattaaataatattaatcttctagcaaacactaagaaagcaactcaaaaaataatcaggaatgaaaagacattattactgatcttacagacataaaaattacaaggactatacagaaatactataagtaatcatatgccaacaaactagataatctaggtgaaattgacaaattcctatgaagacatgaactactgaagctgactcaagaagaaatagaaaatttgaatatgcctataataattaaggaaattcaatgagtaatttaaaacctcataaagaaaagcccatggtcagatggcttccatttgcaatagcttcacttcaaatgtttaaggaagaattaacatcattctttcacagtcttccaaaaaaaataaagaaagaatactcttcaattaacttgatgtgatggttaatattgagtgtcaacctgatgggattgaaggatgcaaagtattgatcctgggtgtgtctgtgagggcatttccaaaggagattcacatttgagtcagtggactgggagaggcagacccaccctcagtctgggtgggcaccatctaatcagcttccagcatggccagaataaaagcaggcagaagaacacaaaagtagtttagtcttccagcctacacgctactcccctgcgggatgcttcctgccttcgaacctcggacctcaagttattcagctttaggactcagactggcttccttgctcctcagggcctattatgggacctcaccctgtgatcgtgagtcaatactccttaaaatactcccctttatatacacatctatcctattagttctgtccttctagagaaccctgactaatgcatttgacaagttatgtattactataataccaaaaccaaagatatcaaaagattaagagatatcctttataaatacggacataaaaattctcaacgaaacactaagatactaaatccagaaacatataaaaagaattatacagcatggtcaagtaagacttatcccaggaatataagattagttcaaatataaaaactaaccaatgagatacactatggtcatagaatacacatgctatgatacagactgaatgttgacatcctccccaaacgtacgtgctggaattctgatccccagtgtgacagcattaggaggtgaaggctttgggggtaattaggtcatgaagacggcgcccatgcaggtgggattagtgtccatacgaaagagatcccagagcgctcccttgccccgtctgccacatgaggacacggggggaagatgccacccatgaaccaggaagccacccaccaccagacaccaaatatgggggagcctccagagctctgagaaatcaatgtttgctgtttcagccacccacgccatgtgatttttgtgacagcaactcgaacaagagaaaaattggcaccgggaagtagcagcacggctgtgacaaattcctaaaaatgcagaagcaactttgggtctgggaaacttgttgaggctgagtcttgaggtgtgtgctggaacaagcctccttcgccatggatgaatttttaaaagtgcttgtgttgagagatcaaaaggaagacaaagcagtatctcttagagaacagctcggccatcatgaatggaatgctgggaggatgcagacagagcattctgtgaggcctgggaaaggaggaacacactatcggacggtggagaagaggctgtgctcctcgcagagtggtgaggaccatggccgaatgcgttcatgctctgggctcctgtggaaggtagagcttgtgaatgaggaattggaaacagtgcacctcagtggcagagggcctcacaaatggccggccggagatgggggctgggtggaaggagccactgggcctgctcgggaggttcctccattgccctgcgcagcctgagccagacagagcgcaaatcccacggagggcgagccctgagccggacagagcgcaagtcccacggagggcgagccctgagccggacagagcgcaagtcccacggagggcaagccctgagccggacagagcgcaagtcccacggagggcgagccctgagccggacagagcgcaagtcccacggagggcgagccctgagccggacagagcgcaaatcccacggagggcgagccctgagcctgacagagcgcgagtcacacggagggtgagcaccacgcgtgactccaacacacccacctgtgctcaccagacgtgagccagacgttctccctccccaaccccacaccacacatctgcctggaggtcgggtagggggtggatctcagctcctctcagcaagaaggaaagcctccaagctccaagggcccaggatgggaggtaaaacaagacaggcgagcacagggagggcgcaaatagagtgggcaaggaggaggcagaacccggctcccctgacctgtgccggcaagcacgtccccagcagcagctccccggatgccatcccagccaggacccgtgcggccagccttggatttctgtgttccagtccacattatttagggatttattttccttctcttttaaggaatgataacactgttttatgtacatatttggtttttttgctttttgcttctgacatgcagctcaataagtcagaagattcttaccaggaaatgaatccacagtcgttttcatgacagcaaattgcatgccaacgagtgacatttaaatgctgaattttaatggcttgtcagaaaaagtgaaatgtatttaaaaaaaaatcatacatgagagagcagtgtgtctgcccatgaaataatgctgcctgtagtagacaagaatggtaaaaacacagtgaacgtattttgttctgtgatgtacacatctacctggaggaagaaggttgtgaaattaactcccatttaccctcctcttcgtgcagaagactctgaaggccgcgcaagcagctgtctgtcaatgaatctgacaactgcacctgcaagaagtggcctggatgaagacgacaggcagaagcacaggatcaactctgtttcaagcgcagttaccaagacagaatcatttctggaatcctgaaaaacctgcatatgaacatgctcacgtgtagacacccacacacatgcacacacacctgcacacacactcacatgctcatgtgtagacacccacacacctgcacgtgtagacacccacacacgcacacacctgcacacacatgtgctcacgtgtagacacccacatacctgtacatgcactcacgtgctcacatgtagacacccacacacatgcacacacacctgcacattcacatgctcacgtgtagagacacacacatgcacacacgtgctcacatgtagacacacacacgtgcactcattcacatgctcacatgtagacgcccacacaaggcaaacacacgtgctcacgtgtagacagccacacatgcacacacacctgcacatgcactcacatgctcatgtgtagacactcacatgcacacacacgtgctcacagacacccacacacatgcacacacacctgcacacgcactcacgtgctcacatgtagacacgcacacatgcacacacatgtgctcacacagacacccacacacatctgcacatgcactcacgtgctcaggtgtagacacacacacatgcacacatgcacacatacctgtacatgcactcacatgctcacatgtagacatacacacacatgcacacacccctgcgcactcattcacatgctcacgtggatacccacacatgtacacacacgtgctcacgtgtagacacccacacacacgcacagacacctgcacacacatgtgctccagtgtagacacccacacgcaaaacctccctactcaaacactccccccatgtgaggctgacaaaactcaggaagacaccaggatttgagattctttccttcaagtgtgcatgcatgtgtgcctgcctgcacacatgcatgcacacctgcacactcattcacgtgctcacatatagatacccacacacacacacctgcacactcattcacgtgctcatgtgtagatacccacacacgcacacacacctgcacactcattcacgtgctcacgtgtagatatcccctacacgtgagcatgggtgtgtgtgcatgtgtgtggatgtctacacatgagcatgtgtgtgtgcaggtgtgcatgcatgtgtggggatgtctacatgtcagcatgtcaatgagtgtgcaggggtgtgtgcgtgtgtgcatgtctacatgtgagcatgtgtgtgtgcaggtgagtgtgcaggtgtgtgcgtgtgtgggtatctacacatgagcacgtgaatgtgtgtgcaggtttgtctgcgtgtgggtatctacatgtgagcatgtgtatgagtgtgcaagtgtgtgtgcaaatgtgtctgtgtctacacgtgagcatgtgaatgcatgtgcaggtacgtgtgccttcgcagcatgcccaccttccagaagcctgcatcctggactagacacaccaatggccctggcaaccaaagaggcctcctgccacagggtcgtcctcctgccacggggtcatccccagggtttgctggaaatgcccaccccaggacacaccccacagctgtgtcagaaccagctgggaaggtgtcagcaattctgtgtccccacaatgcagaagatgacttttcactgtctagagagtccaacagcccaggacacacagtccctggggatggagctgggcagagggctccagctgcccaggccatgggcagttctgatacacctgggcagacgctcagccagggcctgagcaagactggagatgcagggctgcctgggacctctgtctctatgcaaggatacctacgaccccccatctccacatggggctgcctgggacccccctatccccatgtggggctgcctgggactccgtctccataaagatgctcttatcctcaagaacaggtgccaggaatgtggacatagcctgacactcggcacaatattaattttctctgagatggttttccttaggagttaccttttgccattatttggttagattattgtcatgtaatttaaattcatggatatatgagacaaactagaaaaagctattgctttaaaatcataggtgagaaaactcatctctgttggggaattcggggccactagatatttttctatccctccttttgaaactcaccttaaatttcttggtttttttctagtttgtcaggctgagagtcttgtgcattctctggtttcatttcatcccaggacgcccacccaggcagggccccggagcccttgtggcactagctcccatgacaagggagctcaggtgaactccggcaccctgcccccgccacatctcagcacaggatagcacagaaacgtgatgatgttcagtgccagttgccagcacatggtgatagctacatacatacctagagccgggctgaaattacgctcaggggaagttctgaaagagtcacgcccattctcattgaaagacccctggcctccactcgcacgtccagccatcagagtggcaaaagctcatctgtttgctccttaaatgaggcttttccctcttctcaagataataaagtgaagggtgaaacacagagtaaggctcacaagacaagcaaactcagaaaatgtgacacagttgaatatttacacaaccttccttcaatatggctcgctccatgtttgtccctgcgtgggcagcattccgtctgtgtcatctacattgatacccatatctacgtgccctgccaagcctggcactggcctgcgcacagcaccccatcgccaaacgacagtggcacatatggagcaggagctgggcccaagccgccctggaggctcccgtggggaaagggctcaggagtccagtgtggcctggagtgtgcatcagggagctgcccggcgccctggcccacaccgccacacgcgtttctctcaacccgcagtttggctttgtggagggttccccatggactttgggctcaggtgacttgggctttgtttgtgggtggttctgtgtaatgcacaggcaccacccaaaagcagacacgtgtagcactacacaccacccatgctgggaccccctgaaggacagaggtgaacccggaacccctgtaggacagaggtgaacccgggacccccttaaggacagaggtgaacccgggacgccctcaaggacagaggtgaacccgggaccccctaaaggacagaggtgaacccgggaccccctgaaggacagaggtgaacccgggaccccctgaaggacagaggtgaacccgggacgccctcaaggacagaggtgaacccgggacgccctcaaggacagaggtgaacccgggaccccctaaaggacagaggtgaacccgggaccccctgaaggacagaggtgaacccgggaccccctgaaggacagaggtgaacccgggaccccctgaaggacagaggtgaacccgggacgccctcaaggacagaggtgaacccgggaccccctaaaggacagaggtgaacccgggaccccctgaaggacagaggtgaacccgggaccccctgaaggacagaggtgaacccgggaccccctgaaggacagaggtgaacccgggacgccctcaaggacagaggtgaacccgggaccccttgaaggacagaggtgaacccaggacgccctcaaggacagaggtgaacccaggaccccatgaaggacagaggtgaacccaggactccctgaaggatagaggtgaacccgggacgccctcaaggacagaggtgaacccgggacccctgaaggacagaggtgaacccgggacccctgaagaacagaggtgattggaaaccctcctgtgagcagaatctccagcagtgcacctggctggtgattccgcctggaaggagaaacggccagatgtgtgattacttatgaattaatgggctgtggccagtggtttggctggagggccagggactcggagagaatatggttggaaacattgttgacaagggcaactggggaagagacatattagatagacgtctatgaagtggtatgaagtactaagatatgaatgtcccgtgtgaatgttctccaaagagtgacctcagcagaggaggattttaataaccaagtggatagggtgacctgttctgtggacaccagtcagcctctttccccagccaccctgccgttgccccatgggcccatgaacaaggtggtcgcggtggcagagttggaggtgatgcctgggctcccactcaacaaggccagccctgctgtggccacccttgagtccccagtcagccaccacaaagaccatccctgagtccccaacatgacatcattccccgaggtgatcagccagccgccggggggcaggtggttccgcaggcagcttcccctgtggaaggggtggggaatggtccttgctggactagacgcttactccagatgtggatttcccttccctacgcacagtgctcctgccagaactaccctccgtggagtcagaacgccttatccatcaccatggtgtccacacagcactgcttctgaccaagagccctcacttcacagtcaaagaagcgcagcagtgggccggtgctgtgggaattccctggtcctaccatgttgccatatataatttttaaattatcataattttaaaaattatcttctcatcacccctgcagggaccacctgcaacaaaaatttcacaacagtgacaggcagaggctgattctctccaggccgagccacgcctgcactggacccagccaggcccagataagcagccgacgcctgcctactttgtgccaggcccagctgcgggccactgcagcctcctggcatctcctccctcagacacaggaggcagcaggcctgggctcctccaaacccaggaacggacgatcccagtaggaagcacccatgagcccagcgcccggctcccacctgccccttccaccaccacactcgtggattcagtccgtcccagctcctcaccgcccaggaggagaagccaagcccgtgcggtcgctcagtgcggcagccgccgagcctcggcccacgcccgccctacctgtgccggaaagcttctgcaacgccacgcgcaggcgctgcagggccacgggcgacacctcgtagcggtaaaagtccattgccggaaccttctggcaccttccaaacactccatctgtgagaagggaaggagataagacagaacgagacgtttcattttcagagagcaggaaggtgtcacacacgtccttgcaatgcgttctgatcatgtgccgccgtgaggttttggagcacggcgtcaccagagggctgttaggacccgggagcacccggaggatgctggtttgtgagataaaaaccgagcatcacggaaaacacaaatgccaaggtggagagaaagtccagtgtggctgcaatgttgtcactccactttcctccataccccccgagccctccttttatgtaatttcacattttttatgtaaaacttgcctctgacaactcagtgacaacaaaaaaacaaagtcaataacattccaggccagttttccagatgaaaaacagaacacccaggaaatataaatattactttgcaggagctacaaggatcggcggagacgcctctccctgggctgcgtgggaggcaagcacggcttcccgggctcctttccggcggcgcaggagaggcgcggggctggcgaacggtgtgggactaatggggactaatttatttagctcgattccatttgtctgaaatggcagactctgctcatcaacatcctttccaaccacaccttctaattaatttagtccccaattagtctttattcggcgaattgttcactttgagacaagcttcctgtggggtttcaaacattcaaattaccttctttggtgcacacaaaaggttaattcaggcgctactgcttccacacagggcggccatctgcagcttcgggcggggcggaaggggaaatggtctcttttattgttcactaggtttcgccgtgcagcttggctgaagaaagccattcaaatgcaacaagtgtaattagcagaaacacatttgcccagggccaggctgacggtaattgctggtctgatattgcatatatgctcacgacgacggggccgggtgattagcagaaaataacctcgagtattgcaagcgtcctgcgggtttctatgggactttgcaaagcccagggaatccgggaggcagcctggcagctgcgcgggcgggcggacaatggcaaggaggagacgccaggcccgcgccgtttccctccgtgcagcccggccgcgccgcctcctgtccgagagccggcccgagatgcctgcgaggccacacaaaggcggagggctctcggggacgcgtctgcagagcccggcgccccccaccgtccgtgatggacaggccgcaccacaggcgggaacacaggcagatgtgcccgctcctttgccttcctcagacacgcaccattcagtgcaagcaggagtgggaaaggggggaggagggagaaaggggcaaagagggaaaataaggagcgacttcaaacatacccagtgttcctactctgcttttcgaatgaaaatatcttgaaaatagaaaggcaacaagcaggaactgggcagcacgtcgagacggcccagctcccgtgctcacaatgcagaacaatcctaggcctcaggaccaaggcctggggccccagaggagggagtgagccacgggccaggaagaaccaaaagccaggttcctggacccccaagcggggcccaagtcagtgaccacctaatcctaggccagggccggcggcctcttccgatccctgaggccagggaggctcagaagcccagggctccactcagccgcagagcccgcgagctgcactccccaccctcagaaggaaggcgctctcggccggccccagagcagtgacggtgccggctgcctgcagctccccggcctcttgcgcacattggaaaatgcacccccggggtggacgtgcgtggccagctcagggcatggcagagcctggctggtccgggccccactcggccactccgggtgtctgcacacagggcttggtgatttggtgccaaatataagagaagcacatctgtgagtagccaacgcttcgcaacatgcagctgaggatccccttcccaggcaacctcatcaaatcattcagcttttcataaagaaaaatggcccaggacaattcctatcaattttggaacgttccaagcaaagcatttctcaagcataacagcctcattctttaaattttgtttcttgcatacaatgtcataaatatattttaaaattatattagactttcttgaaaactttcttttaaacatttatttagaatatatacaatataatgcataatatagtttgtgcttttaaaatcagttttagctaataattttagctacttgacagttgaaataaactaaccattgattctctttgccttagactatccctgtgctgaatgcagtggacacagacaccatccccagtgcattgttaatagactttatttttagagcagtttagattactgcaaacttgagtggaaagtagggatattttccatgcatcctcacacatgcacacacacacacagcctcccacacacacacacagcctcccacacacacacacacacagcctccctcacacacgcacacagcctccctcacacacaagcacagcctccctcacactcacacagcctccccccacacacacagcctccctcacacacacagcctccctcacacacacacggtctccctcacacacgcacacagcctccctcacacacgcacacagcctcccttgtacacacacagcctccctcacacacacacagcctccctcacacacacacacagcctccctcacacacacagcctctctcacacagcctccctcatacacacagcctccctcacacacactcacagtctccctcacacacacagcctccctcacacacacagcctcccttgtacacagcctccctcgtacacacacagcctccctcacacacactcagtctccctcacacacacacacagcctccctcacacacacagcctccctcgtacacagcctccctcgtacacacacagcctccctcacacacacacagcctccctcacacacacacacagcctccctcacacacacacagcctccctcacacacacacagcctccctcacacacactcacacagcctccctcatacacacacacagcctccctcacacacactcacagtctccctcacacacacacacagcctccctcacacacactcacatagtctccctcacacacacacacagcctccctcacacacacagcctcccttgtacacacacagcctccctcgtacacacacagcctccctcgtacacacacagcctccctcacacacacacacagcctccctcacagggtatttgcagatattaattttccacttttttgggtaaagaccaacacgagtgactgctggctcatatggtaagagtatgcttagttttgtaggaaaccgccaaactgtcctccatggtgacaatcagactaacagtggccgtgccatttttcactcccagcagctgcgatggcacccccatcgcccatgtcctcaccacagtgacaatcagcctaacggtggccgtgccatttttcactccgagcagctgtgatggcgcccccatcgcccgcatcctcagcagcgccaggtggcgtccgtgttcccgcgtcctcggcagcgccgggtggcgtccgtgttcccacgtcctcggcagcgctgggtgacacttggaggcgtccatgttccagcgtttggctgctgtcataggtgtgtatcggtatctcatgattttttatccaatgcatttttcaacaatgatattcatccttatctccgtatttaaaggacttcatgatgtgggtgtcctttattctagtaaatactcagcaataaggcttgttgaagatgattgtgaccagaaggaaggagcccagaagctcccacagatcatgcccaggttcgctgctacctgcttgattttaaggggatactggattcccccaaatatggatacgtgcctagcagtgaaatagaaaattaaggaaatttctaaatacatctggtagaattgatttttatgtggccagaattttgaaactattgctttgttcttccgggtcacttggctaataggcaggaccccaaaaggtctctatgaacatactagagaaaaggactggaaagtcaaatctcaatcaggaaagcatcaggtgcgatgagactccggagtcgggacgccaggggtgatctacacagcaggggtgccggagccagagaaccaaagctcccaccagtccaggctgagctccaccgtctcagacgtgcagtgcggcctctgaaacaatcccgggaagtggcacactgaagtcgcctcaccgccgaccatttaatcaccctagaaaccacccagagcccgtaaccctcaggcccctcctctgcgggactcctgccttcgtgttcttgggacacagccaggaccccacctgggatctgagcttgcttggggtttcctcatgaactctcttctacttcggactctgtttcctgtgccatggccctgcagcctgtcgacatgaccctatcgtcgaagcccggactgacccgtccagctctgcagccctgcgggccatgctgagctcccagctggaagtgcatcaccgcaccgcagtggaggcaggaggccttgggtgatggagcccatccacgagactttcagaaccagggtcctgctcttcgtccagaacgggcattccatgcgcaaccttaattccaagtctcactgctggcaactgagttcaaattgggggctgtctgaaaatcatgggagatgagaacaggtttgcctatgaaaactgtgggctccctgtccacccgtccttggctactgtcaccatcaaaacactcatgtgtgcaaatatatgtgtacgtgtcaatccttatacagaaacacgtgcacagctgctaactcatacacgcacataagcacagccgctaacgtgtttaactgccaaacttactgtgcgtgcccaaggatgccgccaatccaacatcataaacccttccggcaaacagacactgcccgtgcctctgcgcggaagcctaacccccaggtgctcctcgatgacggcttcgtgccttctccctctgtcttccctgcagcgttgggtgctctcatcaacgaggctcatcatctctgtccccagcattgcctgagccttgcaaagccccttcctgttctgggagcaggtcagtgctatgcctgctgcttggctgcctccgccccacaccctcgtcccagggaagccacagctctgccctgcatcctgcttgcatggccaggccaggacagccgggagacacgcacacagaaaaagcagacactgcaggctccatgctccagagcttccaggatcctggggcaacagatgttcaccactgatggttcggttataattgtggacaggctgcaaaaaagggcacgagagcacctgacagagggcactgacctcacccagcggtcagagaacgaacagcggccgacctgaggacatcgaggacactccaggctaagggagcagctccgtgcatggcagcatccagccccggtgggcgacggggagggagcagttccgtgcatggcaacacctggccccagtgggcggccaggagggagcagctccgtgcatggcagcacctggccccagtgggcaacggggagggagcagctccgtgcatggcagcacctggccctggtcagccccagtgggcagtggggacaaggccttgcagttctggatcaggcaggagaggacaccaagctggtcaagccactcaagcagattgtgcagagcctgcgggaatcagaggcagtggccttcatcccaggagctagaggaggccacctccacttgggtggtgttccaggcagggcaggctcttgaatgggtctgcgttttaaaacagatctccctggcaagggctggagattgccaggagcccatggcgggtaaacagagcagccccaaccaggggatggtggctaagtgaggatggtggtcatggagaccagagacctggatagactggagccatctgcaaggtgaaccttaggacaacacacatccctctgccggcagcagcaaccaggcctttccacatgctacccagcccatgcacagacaggcttgtgggggaggggaatattctgggagacgttctgtagaatgagtctttttccaaaacaggaaggaaggcaggcttcttgctgccctggctgggagaggcgagacatggaaggcgtcccccgacaagaattctgcctggcctggaactccgatatcagggactcaacgaactggggggcctcacacccccagagttctgggatgcaacccccttcactgtgcagacagaaggctggaccccacagaactccaatctcagggactcagtgaaccagggggccccacatttcagagttctaggacgcaaccccttcactgtgcagacagaaggctggaccccactgcctctgggaccggaatggacagtgctaaagacagtgagagaaggaatgcccaggatgcagagcagcggatgaacagggcccaggacaatggacacaaaagctttgaggagcaaaaggtttgcttagagacacttttattaacagtaatctagaattgggtggtcagtttctttcatttgaaagaaaatattgagcattttctgtggttggatttttggagaaataagaaaaagagctcatttatcttggtaatttgttttaaacagtggtccttagagcactgttcccacaggccaaagtaatttcattcgcaagcgtcactgtccccaaaacacaaacacaggcctcctccaggaccaagcttccagcccacttctattctcatatagtctgtggggctgcatacctccctccaaccttacaccacacgtgtgtacacggtgcatgtatgcacattcatacctgcatgaaccaacacacacattttcacacacttctcccatgcacgggacactcacacatacacacactcacacgcacccacgtgaacattccaacacatgtacacacacacaagtgtgcacacactcatttgcatgcacttgattatgcagacacacacacaggagcacgtacacacacatttgcaaacgtgcacacacacacacacacacccagacacactaactcatatacaggtgcacacaagcgcacatgcacaaactcacacgcccacacgcgtacgctcacacacagtctccgcatagacaagacggcacctcgcctctaccgccctgcaggaccaccctctccccggtgacaccgtgagttcctggaaggcagggatcacagctacagcctcttcacgcccccacagcatctggtacagtgccttgcccccggtgtggactaaaaggatgttagtgaatgactataactggtattttcccatttgtctaaaagaaaatggagatgtccgtggaagtgtttaagaccatcagctagaagcctcatttgttgaaatctcacatagatttacaagtcctcacccctggcagtgacccacttggatgaaagactcactggggaccaaaaaggctggtggtgggggcaccctaggaggggctggcatgagtctcgcaagttctcaggtggccatgcgcctccaccccatcccgtactgtctctctgcttgggctcagagggccgattgacccccagcatttctatccccagctccataagtgaagcaggtgatcctagtggacctctgttcttcagagtaagggtggggctctgctgcccagggtgcccccagagggtcctgttgcttggagatactgagcctccactctctgtgacacccatagcactgacccagaaccatccaattggagcaccggaaagctgtggaccgaacaaggtggctttgataccctgtgaggaaagtactcttgccacactttgcttaggtgatacgcccaggcctgcactaaacgacatcccgagtgacacgtccaggcctgccctagaggatatcctaggagaaatggcccagagacgctaactgtgcatctgctgagaaacgtcactcactgcgttaccccacaattctccacagagatccacagggggtcccccagtccccacaattatccacagagatccacagggggtcccccaggccccacaattctccccagagatccacagggggtcctccagtccccacaattctccacagagatccaagggggtcccccaggccccacaatctccacagagatccacagggggtcccccagccaggagcatcttccttccaccaaacgccgtgaacacgaccagctcctgggcagggacacctcctgcttacaggcgcctgtggcacagattccagtgaactaaccatctgcttttcccctttttctaatatctttacctacttttacttatatgtctttttttttttaacatttcttatttatttatggaaatataacaggacttgggaattaatgaatacaatatgatcacttaatttagtatttcaaagtgaggcaattagcttagggcattgtttgaaataaccacaatgcgcatacctattcaatcatttgtgtaaacagcatattaaggtaaatggtatgcacgtgaaaactgatttatctcagctgcctggaaactatcagaacaaagttcttgaattgtgagcaagaagggatgggcagaaaaggcaccccaattacgaagcctttgcagatgagaggcgtgggaggctgtattccgacaagaagggcaggcgagagacacccggcaaaccaccgggcaggcagaaccccggcggagcaagcactagcacgttccagggctgggcagggactgcgaccatttctagaatcgtcacaaagccatcgctgagacagacactcaggtttgcagaatactgtctacagtaaacaccaaatgcatccgctcttgcggctgccagctgaccctgcccagacaaaaggaacgggcagtcagtctcacagcagctccctgggaacacacctgggaagcccaggaggggaacgcggcctcctgggggtgtcccaggcactgaacccagagcctagaaacagcaacgttgcagggctcagggcgcactttccagagagaatgggaccacatccagggccccacaggccatacccgccgcaggtcttgagtctggcagccagggagggagcacagccgcctctcatgaaacaatggcaccctgctgtgcttcttcaagctggtctgtcactcactccctccctgcatccaaacaaggcaaggcccagaggctgcggtcacccaggtggccagtgagcaccaagcagcaccagtgacccctcgtggctgcctccctgcagtgccagttcttcatccgagacatcgctcaggagccctgctctggctcaggcctgaagatgccagtggcagactcagtcggccagtgtgaggggccaggagacgagacactgctgcccagtacagcaggagaattaatgcacacttgtacacgtgtgcacaatacacaagcaaccacatacacagacattcacagcatgcacacacaatgtatgcagacacatgcacatatgcagacacacaaccacataatgcatgcacattctcacatacacgtcctcacacatgctctcacaggcacacgttctcacacacatgcacattctcacatgcacacgttttcacacatgctcacactctcacatgcacacacatgcacagtctcacacatgcacacatcctcacacatgctctcacatgcatacattctcacacacatgcacattctcacatgcacgtttcacacatgctcacacactcacatgcacacacatgcacattctcacacatgcacacatcctcacacatgctctcacatgcattctcacacacatgctcattctcgcatgcacacgttctcacacatgcacacattctcacacatgcacatgctcacacgttctcacatgcacacatacacattttcacacatgcacacacgcacacattcacatgcacatacacattctcagatgcacacacatgcattctcacatatatacacattctcacacatgcacatgtacacattctcatctgcacatacatgcacacattctcacatgcactcattctcacccatgcacattctcacacaagcacacacatacacactcatatccacacacgtgcacacattctcacatgcacacacacatgctcacattctcacacatgcacacattctcaaacacacacgtaaacattctcatatccacatacatgcacacattctcacatgcacacacgtgctcacacatgctcacacatgtacacattctcacacatacacattctcacatgcacacacgtgctcacacatgctcacacatgtacacattgtcacacacacattatcacatgcacacacatgctcacacatgctcacacatgtacacgttctcacacacattctcacatgcacacacctgctcacacatgtacacgttctcacacatacattctcacatgcacaagttctcacacacatgaacattctcacacacatgcacatgtacacactatctgttctcacatgctcacacatgtacatgttctcatgtacacactcactactcacactcagaatagcagaaggagccctcaccagcctgggaccgccatgctccaggtgtcctgctgtaccaggctaggtcaccctttcattctttcctgcctcccctgctggggtccctcaggaccctgcctctctcccactgccccctcctggtggaggctgccttgccaaagtaccttcaatctgtaaatcccggtgccctgggacactggagctgcctctgaagtcccctccctgcagggagctggcagcgttgccagggttccctcggtcccatggggcttctcaaagcagcaccacagacggaggagcccactgctccatcagggtccccaggggtgcagcaacaagaaaaaaatctccccagctatttttggaggagggaaaagtaattacagctcagaatcactgccctgttgaaaggaattctccagagggagaaaaagccctttatctgaactgatcaagcacctgccatgcacatttctgcaaggaagctgtaaaagtgctcccattctgcaaggaagctgtaaaagtgctcccattctcagggagtagaaactgctgtcatggcatccagtcataactgctgcaaaaattccaggaggccaaaggtgaatcctgagagacagcaatggcttctgaggcccaaggaagcaggcactggctcaccacacacccaggtcagatttaaggagccgttggatccgtgggctgcgtccaaggcaggactgctgtgaagtctgagcagcttagttcgtaatgaaacctgaagataagccgagaccctatatcgctggaaattcctttattttcaaggatttcgttacagttcagagcagccactgacaggcagcagaaggcaggggacagagtgacagtgcctgggagcggccagcacagcctatgcatctgcagagcagcgtgaggctctgactggggaggagccccacgtccgggcagcacctgcacccacagcgggagcctcactgtccggagaggccagcttcccttgtgtgaggagcagggcccccattcctcccaccacccagatcccagtgaggcctgggatggtatatccaggagaggccagcttcccttgtgagtgtgagtgacgtctgcaggtgtcaggtcttatggtgagagtgtgggtgtcagtgacatctgcaagtcactaggagcggggcctccattcccccccccccgccacccagggatcccagggaggcctgggacagtaaatccaggagatcccagcttccctgagcgacaagcgggacctctgttcctctcgccacccagggatcccagtgaggcctgggacggtaaatccaggagaggccagcttcccttgtgagtgtgagtgatgtctgcaagcatcaggtcttatgatgagattgtgggtgtgagtgacatctgcaagtcactatgagtggggcctccattcctcccgccacccagggatcccagtgaggcctgggatggcaaatccagcggcgcacagcccactgcaccgagggaggcgcacgacagaagccacagcttgagggtgtgagccggcagtactgaggagcccagcagacaccggccaggcggggcagggggaagcgtggcgggtgggaggcccttctgggaggtgaggagcaggctaggaggggaggacagtgaagacagtgccaagaacacagccagtcatgcctccctcacggagcaccagcgcgcccagcacttcccagccttttacctttaaggatgccttaaacccccaccccaagcccatgaggctcctcctccatgcaacaggctgtgtgccgaaaccagccccgggtgctgctgttagcaggcggacggctgagaggcgaggaggtggggccttccttacacaggccccaaggacggctcacgctccagccacatgaggacacgtgaggaggcaccgtcgatgagccaggaggggactcgccagacaccagacgtcaaccctgccagggcggtgaccttggcttccagccttcagaactgagaaatcaatgtctgctgtttctaagccccgcaataggtggtactttgagcagccttcatggactaagacactgcgtattattatcccattgacgccatgtggaaattaaggcacagggaggttaaggaacttgctcagagttggcctgggagtcgcaacccaagatctgtccacatggtcccacttcaccgctcgaggctgtgtcctctacggagactcactttcactttagactgtagatgccagcgtctgactgagaaaatgcggtcaccatagctacatggagtgactggcagagtgtcctattctgcaaccaactcacaaaatcctcaggtcttgtatggcgactctcaccataagagctcacgcccgcagacgacactcacacccacactctcaccataagaggtgacatctgcagacgtcactcacacccacactctcaccataagagctgacacctgcagacgtcactcacacccacactctcaccataagagctgacacccgcagacgtcactcacacccacactctcaccctaagaggtgacacccgcagacgtcactcacacccacactctcaccataagagctgacacctgcagacgtcactcacacccacactctcaccataagagctgacacccgcagacgtcactcacacccacactctcaccataagagctgacacccgcagacgtcactcacacccacactctcaccctgaggtgacatctgcagacgtcactcacacccacactctcaccataagagctgacacctgcagacgtcactcacaccaacactctcaccataagagctgacacccgcagacgtcactcacacccacactctcaccctaagaggtgacatctgcagacgtcactcacacccacactctcaccataagagctgacacccgcagacgtcactcacacccacactctcaccctaagaggtgacatctgcagacgtcactcacacccacactctcaccataagaggtgacatctgcagacgtcactcacacccacactctcacaataagagctgaggcacaaagaggtcactcacatccatactctcaccataagagccgacacgtgcagacgtcactcacacccacactctcaccataagagctgacacccgcagacgtcactcacacccacactctcaccataagagctgacacccgcagacgtcactcacatccacattctcaccataagagctgatgcccgcagacgtcattcacacccaaactctcaccataagagctgacacctgcagacgtcactcacacccacactctcacgataagagctgtcacacgcagacgacactcacacccacactctcaccataagagctgacacccgcagacgtcactcacatccacactctcaccataagaggtgacacctgcagacgtcactcacacccacactctcaccataagagctgatgcccgcagacgtcactcacacccacactctcaccataagagctgacgcccgcagacgtcactcacacccacactctcaccagaagagctgtcacacgcagacgtcactcacacccacactctcaccataagagctgacgcccgcagacgtcactcacacccacactctcaccataagagctgacacccgcagacgtcactcacacccacactctcaccataagagctgaggcccacagaggtcactcacacccatactctcaccataagagctgacacccgcagaagtcactcacacccacactctcaccataagagctgaggcccacagaggtcactcacacccatactctcaccataagagctgacacccgcagacgtcactcacacccacactctcaccatacgagctgtcacccacagacatcactcacacccacactgtcaccataagagctgacacccgcagacgtcactcacacccacactctcaccataagagctgaggaccacagaggtcacttacagccatactctcaccataagaggtgacacctgcagacgtcactcacgccgacactctcaccataagaggtgacacttgcagacgtcactaacacccacattctcaccataagagctgacacctgcagacgtcactcaaactcacactctcaccataagagctgtcacgcacagacatcactcacacccacactgtcaccctaagaggtgacacccgcagacgacactaacaaccagattctcaccataagagctgacacccgcagacgtcactcacacccacactctcaccataagagctgacgcccgcagatgtcactcacactcacactcccacgataagagctgacaactgaagacgtcactcacatccacactctctccataagagctgacaaccgcaaacgtcactgacacccacactctaacgataagaggtgacatctgcagacgacactcacacccacactctcaccataagagctgaggcccacagaggtcactcacacccatactcccaccataagagccgacacctgcagatgtcactcacatccacactctcaccataagatgtgacacctgcagacatcactcacatccacactctgtccataagagctgacacccgcagacgtcactgacacccacactctcacgataagaggtgacatctgcagacgtcactcacacccacactctcaccataagagctgaggcccacagaggacactcacacccacactctcaccataagaggtgacacctgcagatgtcactcacacccatactctcaacataagagctgacacctgcagacgtcactcacacccacactctcaccataagaggtgacatctacagacggcactcacacccacactctcaccataagagctgaggcacaaagaggtcactcacatccatactctcaccataagaggtgacacctgcagacgtcactcacacccacactctcaccataagaagtgacacctgcagatgtcactcacacccacactgtcaccataagagctgatgcctgcagacatcactcacacccacactctaaccataagagttgacacctgcagatgtcacttacacccacactctcaccataagagctgaggcccacagaggacactcacacccatactctcaccataagagctgatgcctgcagacgtcactcacgtacacacttctcaccataagaggtgacacatgcaaacgtcactcacacccacactctcaccataagaagtgacacctgcaaacgtcactcacacccacactctcaccataagaagtgacacctgcagacatcactcacacccacagtctcaccataagaggtgacacctgcagacgtcactcacacccacactctcaccataagagctgaaacctgcagacgtcactcacacccacactctcaccataagaagtgacacctgcaaatgtcactcacacccacgctctcaccataagaagtgacacctgcagacatcactcacacccacagtctcaccataagaggtgacacctgcagacgtcactcaaacccacactctcaccataagagctgtcgcccgcagacgtgactcacacccacactctccccaaaagagctgtcgcccgcaggagtcactcacacccacactctcaccataagaggtgacatctgcagacgtcactcacacccacactgtcaccataagaggtgacacctgcagacgtcactcacacccacactcgcaccataagaggtgacacctgcagacgtcactcacacccacactgtcaccataagaggtgacacctgcagacgtctctcacacccacactctctccataagaggtgacacctggagacgtcactcacacccacactctcaccataagacctgacactcgcagacgtcactcacacccacactctcaccataagagctgatgccggcacacgtcacacacacccacactctcactataagaggtgacacctacagacatcactcacacccacattctcaccataagagctgacacccacagacatcactcacacccacactgtcaccataagagctgaggcccacagaggtcactcacacacatactctcaccataagagctgacacccgcagacatcactcacacacacactctcaccataagagctgaggcccacagaggtcactcacacccacactctcaccatagagctgacacccgcagacgtcactcacacccacactctcaccataagagctgacacccgcagacgtcactcacacccacactctcaccataagagctgtcgcccgcagaggtcactcacacccacaatctcaccataagagccgacacccgcagacatcactcacacacacacgcgtcactcacactcacactctagccataagagctgacgcccgcagacgtcactcacacccacactctcaccataagaggtgacacctgcagacgtcactcacacccacactctcaccataagaggtgacacatgcagacgtcacacacacccacactctcaccataattggtgacacctgcagacggaactcacacccacacatgtcactcacacccacactctcaccataagagctgacacatgcagacgtcactcacacccacactctcaccataagagctgacacctgcagacgtcactcacacccacacgtcactcacacccacactctcaccataagagctgacgcccgcagatgtcactcacacccacactctcaccataagaggtgaaacctgcagacgtcactcacacccacactctcaccataagaggtgacgcccatagacgtcactcacacccacacacgtcactcacacccacactctcaccataagaggtgacacctgcagacgtcactcacacccacactctcaccataagagctctcgcccacagaggtcactcacacccacactctcaccataagagccgacgcccgcagacgtcactcacacccacactctcaccataattggtgacacctgcagacgtcactcacacccacactctcaccataagaggtgacacctgcagacgtcacacccacactctcaccataagaggtgacgcccgcagacatcactcacacccacactctcaccatagagctgacgcccgcagacgttactcacacccacactctcaccataagaggtgacacctgcagacgtcactcacacccacactctcaccataatagctgtcgtccggaggcgtcactcacacccacactctcaccataagcgctgtcgtccggaggcgtcactcacacccacactctcaccataagcgctgacacctgctgacgtcactcacacccacactgtcaccataagagctgacacccgcagacgtcactcacatccacactctcaccataagaggtgacacctgcagacgtcactcacacccacactctcaccataagagctgaggcccacagaggacactcacacccacactctgaccataagaggtgacacatgcagatgtcactcacacccacactgtcaccataagagctgatgcctgcagacgtcactcacacccacactctcaccataagaggtgacacctgcagacgtcactcacacccacactgtcaccataagagctgaggcccacagaggacactcacacccatactctcaccataagaggtgacacctgcagatatcactcacacccatactctcaccataagagctgacacctgcagacgtcactcacacccacactctcaaccataagaggtgacacatgcagatgtcactcacacccacgctgtcaccataagagctgatgcctgcagacgtcactcacacccacactctcaccataagagttgacacctgcagatgtcactcacacccacactctcaccataagagctgaggcccacagaggacactcacacccatactctcaccataaaagctgatgcctgcagacgtcactcacgtacacacttctcaccataagaggtgacacatgcaaacgtcactcacacccacactctcaccataagaagtgacacctgcaaacgtcactcacacccacactctcaccataagaagtgaaacctgcagacatcactcacacccacagtctcaccataagaggtgacacctgcagacgtcactcacacccacactctcaccataagagctgacacctgcagacgtcactcacacccacactctcaccataagtgacacctgcaaatgtcactcacacccacactatcaccataagaagtgacacctgcagacatcactcacacccacagtctcaccataagaggtgacacctgcagacgtcactcacacccacactctcaccataagaagtgacacctgcaaatgtcactcacacccacactctcaccataagaagtgacaactgcagacatcactcacacccacagtctcaccataagaggtgacacgtgcagacgtcactcacacccacattctcaccataagagctgtcgcccgcagaggtcactcacacccacaatctcaccataagagccgacgcccgcagacatcactcacacccacacacgtcactcgcactcacactctagccataagagctgacgcccgcagacgtcactcacacccacactctcaccataagaggtgacacctgcagacgtcactcacacccacactctcaccataagagctgacacatgcagacgtcactcacacccacactctcacaataattggtgacacctgcagacgtcactcacacccacacatgtcactcacacccacactctcaccataagagctgacgcccgcagatgtcactcacacccacactctcaccataagaggtgaaacctgccgacgtcactcacacccacactcaccataagagttgacacctgcagacgtcattcacacccacactctcaccataattggtgacacatgcagacgtcactcacacccacacgtcactcacacccacactctcaccataagagctgacgcccgcagacgtcactcacacccacactctcaccaaaagagctgacgcccgcagacgtcactcacacccacagtctcaccataagaggtgacacctgcagacgtcactcacatccacactctcaccataagaagtgacacctgcagacgtcactcacccacactctcaccataagagctgtcgcccgcacaggtcactcacacccacactctcaccataagatccgacgcccgcagacgtcactcacacccacactcgtcactcacactcacactctcaccataagagctgatgcccgcagacgtcactcacacccacactctcaccataagagctgtcacccacagacatcactcacacccacactgtcaccataagagctgacacccgcagacgtcactcacacccacactctcaccataagagctgaggcccacagaggtcacttacagccatactctcaccataagaggtgacacctgcagacgtcactcacaccgacactctcaccataagaggtgacacttgcagacgtcactaacacccacattctcaccataagagctgacacctgcagacgtcactcaaactcacactctcaccataagagctgtcacgcacagacatcattcacacccacactgtcaccctaagaggtgacacctgcagacgtccctcacacccacactctcaccataagaggtaacacctgcagacgtccctcacacccacactctcaccataagaggtgacacccacagacgtcactcaaacccacactctcaccataagaggtgacacctgcagacgtcactcgcacccacactctcaccataagaggtgacacctgcagacgtcattcacacccacactctcaccataattggtgacacctgcagacgtcactcacacccacactctcaccataagaggagacacctgcagacgtcattcacacccacactctcaccataattggtgacacctgcagacgtcactcacacccacactctcaccataagagctgacgcccgcagacgtcactcacaaccacactctcaccataagaggtgacacctgcaaacgtcactcacacccacactctcaccataagaggtgacgcccatagacgtcactcacacccacacacgtcactcacactcacactctcaccataagagtgtgacacctgcagacgtcactcacacccacactctcaccataatgagtctcgcccgcagaggtcactcacacccacactctcaccataagagctgacgcccgcagacgtcactcacacccacactctcaccataattggtgacacctgcagacgtcactcacacccacactctcaccataagaggtgacacctgcagacgtcacacccacactctcaccataagaggtgatgcccgcagacatcactcacacccacactctcaccatagagctgacgcccgcagacgttactcacacccacactctcaccataagaggtgacacctgcagacgtcactcacacccacactctcaccataatagctgtcgtccggaggcgtcactcacacccacactctcaccataagcgctgacacctgctgacgtcactcacacccacactgtcaccataagagctgacacccgcagacgtcactcacatccacactctcaccataagaggtgacacctgcagacgtcactcacacccacactctcaccataagagctgaggcccacagaggacactcacacccacactctgaccataagaggtgacacatgcagatgtcactcacacccacactgtcaccataagagctgatgcctgcagacgtcactcacacccacactctcaccataagaggtgacacctgcagacgtcactcacacccacactctcaccataagagctgaggcccacagaggacactcacacccatactctcaccataaaagctgatgcctgcagacgtcactcacgtacacagttctcaccataagaggtgacacatgcaaacgtcactcacacccacattctcaccataagaagtgacacctgcaaacgtcactcacacccacactctcaccataagaagtgacacctgcagacatcactcacacccacagtctcaccataagaggtgacacctgcagacgtcactcacacccacactctcaccataagagctgacacctgcagacgtcactcacacccacactctcaccataagaagtgacacctgcaaatgtcactcacacccacactctcaccataagaactgacacctgcagacatcactcacacccacagtctcaccataagaggtgacacctgcagacgtcactcacacccacactctcaccataagagctgtcgcccgcagacgtgactcacacccacactctccccataagagctgtcgcccgcagaagtcactcacacccacactctcactataagaggtgacatatgcagacgtcactcacacccacactgtcaccataagaggtgacacctgcagacgtcactcacacccacactcgcaccataagaggtgacacctgcagatgtcactcacacccatactctcaccataagagctgacacctgcatacgtcactcacacccacactctcaaccataagaggtgacacatgcagatgtcactcacacccacgctgtcaccataagagctgatgcctgcagacgtcactcacacccacactctcaccataagagttgacacctgcagatgtcacttacacccacactctcacgataagagctgaggcccacagaggacactcacacccatactctcaccataaaagctgatgcctgcagacgtcactcacgtacacacttctcaccataagaggtgacacatgcaaacgtcactcacgcccacactctcaccataagaagtgacacctgcaaacgtcactcacacccacactctcaccataagaagtgacacctgcagacatcactcacacccacagtctcaccataagaggtgacacctgcagacgtcactcacacccacactctcaccataagagctgacacctgcagacgtcactcacacccacactctcaccataagaagtgacacctgcaaatgtcactcacacccacactctcaccataagaagtgacacctgcagacatcactcacacccacagtctcaccataagaggtgacacctgcagacgtcactcacacccacactctcaccataagagctgtcgcccgcagacgtgactcacacccacactctccccataagagctgtcgcccgcagaagtcactcacacccacactctcactataagaggtgacatatgcagacgtcactcacacccacactgtcaccataagaggtgacacctgcagacgtcactcacacccacactcgcaccataagaggtgacacctggagacgtcactcacacccacactctcaccataagacctgacactcgcagacgtcactcacacccacactctcaccataagagctgatgccggcacacgtcactcacacccacactctcactataagaggtgacacctacagacatcactcacacccacattctcaccataggagctgacacccacagacatcactcacacccacactgtcaccataagagctgaggcccacagaggtcactcacacccatactctcaccataagagctgacacccgcagacgtcactcacacacacactctcaccgtaagagctgacacccgcagacgtcactcacatccacactctcaccataataggtgacacctgcagacgtcactcacacccacattctcaccataagagctgtcgcccgcagaggtcactcacacccacaatctcaccataagagccgacgcccgcagacatcactcacacccacacacgtcactcacactcacactctagccataagagctgacgcccgcagacgtcactcacacccacactctcaccataagaggtgaaacctgcagacgtcactcacacccacactcaccataagaggtgacacatgcagacgtcacacacacccacactctcaccataattggtgacacctgcagacgtcactcacacccacacatgtcactcacacccacactctcaccataagagctgacacatgcagacgtcactcacacccacactctcaccataagagctgacacccgaagtcagtcacacccacacacgtcaatcacactcacactctcaccataagagctgacgcccgcagatgtcactcacacccacactctcaccataagaggtgaaacctgcagacgtcactcacacccacactcaccatgaggtgacacctgcagacgtcattcacacccacactctcaccataattggtgacacctgcagacgtcactcacacccacacgtcactcacacccacagtctcaccataagagctgacgcccgcagacgtcactcacacccacactctcaccataagaggtaacacctgcagacgtcattcacacccacactctcaccataattggtgacacctgcagacgtcattcacacccacactctcaccataagagccgacgcccatagacgtcactcacacccacacacgtcactcacacccacactctcaccataagaggtaacacatgcagacgtcactcacacccacactctcaccataagagctgtcgcccgcagaggtcactcacacccacactctcaccataagaggtaacaccttcagacgtcattcacacccacactctcaccataattggtgacacgtgcagacgtcactcacacccacactctcaccataagaggtgacatctgcagacgtcactcacacccacactctcaccataagaggtgacacccgcagacatcactcacacccacactctcaccataagaggtaacacatgcagacgtcactcacacccacactctcaccataagagctgtcgcccgcagaggtcactcacacccacactctcaccatagagctgacgcccgcagacgtcactcacaccgacactctcaccataagagctgacacctgcagacgtcactcacacccacactctcaccgtaagaggtgacaccagcagacgtcactcacacccacactctcaccataagagtgtgccccgcaggcgtcactcacacccacactcaccatatgagctgacacctgcagacgtcactcacacccacattctcaccataagagctgtcgcccgcagacgtcactcacacccacactctcaccataagaggtgacacctgcagacgtcactcacacccacactctcaccataagagctgacacccgcagacgttactcacatccacactctcaccagaaggggtgtcacctgcagacgtcactcacacccacactctcaccataagagctgtcgcccgcagaggtcactcacacccacactctcaccataagagccgacgcccacagacgtcactcacacccacacacgtcactcacactcacactctcaccataagagctgacgcccgcagacgtcactcacacccacactctcaccatagagctgacacccgcagacgtcactcacacccacactctcaccataagagctgacacctgcagacgtcactcacacccacactctcaccataagagctgacatctgcagacgtcactcacacccacactctcaccataagagctgacacctgcagacgtcactcacacccacactctcaccataagagctgacacctgcagacgtcactcaaacccacactctcaccataagagctgacacctgcagacgtcactcacacccacactctcaccataagagctgacacctgcagacgtcgctcacacccacactctcaccataagagctgacatctacagacatcactcacacagtcaactcagtcagtccttatgataacccttagtggcataaactgtcatggtccccattccatattcagaaactagagcccagagaggttgggtgccttgctggagcccatagaggaatgggcagcggcaggaaagtctgactgacacttagcacccatgagggaggtacggaaacaggatcaaccattccagaccaccgggagctcaggaaacctcatcatcgtgctcacttgagccaagatccaggaaatattaagtccttaggggcttcaaaagcgaaggagaacggcagggtggacaagtgctgggttcttttcagccagcacatgccgatgaccagctctgcgttgcagtgagctgagattgcgccattgcactccagcctgggcaacaagagtgaaacttcatctcaaaaagaaagaatgtaaccatcaaaattaaaacttctgtgcatcaaaggacactattagcagcaggaaaaggcagccagggagtggggaaatatttgccctcatctatctgataagggatttgtatccaaaatacataaagaaccacaactcgacaacaacaacaaaaaacctgattaaaaacgggtaaaggacctgagtagacttttctccagagaagatgtacaaacagctgaaagcacagggaaggcgcccagcatcaccagcgtcaaggcaacgcaaatcaaaaccacagtgagacctactgcccgctcagcaggacatctgctatcaaaaaacgaaacgaagcaaaaccgaaaataacgcgtgtgggtgagaacatggagaaaatagggccctgtgctccgcgggcaggaacgtaacctgatgcagtcgccgtggaaagcacacgggaaaagttcaatgtggaagtagcagatgatccgacagccccatttgattttacacccaatacctgcaagcagggctcgcgcagaggctcaggcagccatgctggtggcacatgggctgtcgcgactgctcccggtggaatcagccccatttctgattttacacccaacacctgcaagcagagctcgcgcagaggctcaggcagccatgctcgtggcacgtgggctgtcgcggctgctcccggtggaatcagccccctttctgattttacacccaacacctgcaagcagggctcgcgcagaggctcaggcagccatgctcgtggcacgtgggctgtcgcggctgctcccagtggaatcacagctacaatcgagctcaggtaaaggcttccatggagggtctagactgcatttccaggcaccaggatgagtttaaattcagctcccaaagaagaccagtgaacacaccaatgaacatacacttcacactgccacaccccaagataagacccagaaactcacattcagggaaagacagcccctcttacatgccacccagacccccatacgagagtgtcagaccccagcaccttccaaaaacacaaaatgtccccctgccgaggagccagcacctgggcccttagaagccgtgacaacgagcagcaaagcgcagggcctcacccaagagatacccaggacagcacagacgggggaagctccagcaaccccacacaggccccaagaagccaccagccagaccaggctcgggaagagctgtcttcagcaggaacaaggcagtttagtaactagaagcaatatgggatggggctgagccatcatcaggagctccgtccagtggggagcattggccccagtcgcaggcaagggaggctgtttcaagtttaggcctccagaagaggcagctcctcgaccaaactgaagacacataatttcctgttaaattaacacttgcaacgccttgcacccaggtcttgaatgctaattatactcgccggcatttaatacaagacaccctggagtctgggctgaaatgccacacaggaatctggaatcgcataaaacgtggaaaaccagacttttctagcccaagaatgagtgagatgtaaaaatcaaagaggtcccacacgtaacccaccaagaaagaacaagtgaggctgtgttgctggaggtggtcgctctccccaagctcagtcctgacagaaatgacgctctgacggtgcacgatttgcaatgtgcaggaacagaccccagcacctttcatcggtgggtttaggagaggggcccaggggaccctggcactcctctgatgagaaatcaggcaccagcttgtgcatctgtttccctggaaatcactgcttccctgttggtttgcacatgtcctgtcagccctgtgaggtgagaacccagaagctgatggacgatacccaaaacagagctttaggcagaagacagcttggacccaaggcctcagttaggccatggagggaaagtatggtgcggacacctgggaccgcagtgggcgggagaaattctggaggataaaatgttgggccccagtgctccatctctgagggtggaccctgctgcctgggagcagtcctggcaggacccccacagtccacgtgactgatggtctaggcctatgtctgctcaactatgatggcataaacacccctcccagcagagccttgaaactaaagaagtcatctgagtgactagacgttaacaaggagagaaaacctaactgcctgtctcctggccaacgggaagacaggttttttgtcttactttgggttttgtcttaatttgggttttttgtgggctactctggtaaccagagctttgtctggagacagcgtgttcttataggaggccacagagggttttatgaagagtaagcttcggaggctcaggaggacttgtatttttgagcagggtggagcaagagaaagaacaaagacaaaggccaccggttttggaagccccaggtagaaggagacagggtcttccacccccgtggaaaaacctcctgaagctacaagctggggccaaagctggtgtggcagcagtggtcacccagagctttccaatgccgtccactcatcccaggtggggaaactgaggctgaggaagcaaaatgacttggtcacacacattttataatttacaattgtatatatatatgggtgtccattttcacacagctataaagaactacccaagactaagtaatttttgaagaaaagagatttaattgactcacagttccacagggctggggaggcctcaagaaactagtcatggcaaaaggcgaaggagaagcaagcaccttcttcctgaggcggcagaaggagtgggggtggggggagtgctacacttttaaaccatcagctctcatgagaactccctcactatcacgagaacagcgtggtggaaaccacccgcatgatccagtcacctcccaccaggtccctccccaacgctggggattacaactcaaggtgagatgtgggtggggacacagagccaaaccatatcaatgggtacaaggcaatgctatgatttatgaatacaatgtggaataattaaatcaagctagttaacatatccatcacttcaaatacttaacatttttgtggcaaaaacatttggaatttgttctctcagcagttttgagatgtataaccgtctactgttatcttcatcacactgtacaatcgaactcaaaaaattgcccctgagatttgtgccctccacctgttatctccccattccctccacccctggcctctggcgacctcagttctactctctgctactgtgagttcaattgttttcagttccacatatgagtaagatcatgcggtatttgtctttctgtgcctggcttatttcactcagcgtaatgctttccaattccatccatgatgctggaaatcacagaattccttcctttttaagactgaatagtatcccactgtgtctttatccatccatctgtcgatggacatttaggttgattctatgtcatggccattgtggacagtgctgcagtaaacatgagggtgcagatctctcttcaacatgctgattttacttcctttggataaatacctcatagtgggattgctagatgatatggtagtttgttgtttgagaggcctccatacagttctccataatgactgtaccgatttagattcccaatagtgcacaagatttcccttttcaccacttcctcaccaacacttgctgtctttttaataatagccattctaacaggtgtgatatgatatcccattgtggttttgatttgcatttccctaatgattagcacagttgagcatcttttcacatacatgttggccatttttatgtcttcttttgagaaatatctactcagattctttacctgtcttttaattgggtttttcattttcatgctattgagttgtttgagcttattatatattttggatattaagcccttattggatgtacagcttgcaaatattttctccccatccttaggttgtctgtgcactctgctaactgttttgtttgctgtgtagagctttgtatttgatataatcccatttgtttatttttgattttgttgcctgtgctttggggatcaaataaaaaaaattgttgcccaggataatgttatgtcattttgccctgtgatttcttctagtagttttacagtttcaggtcttaaatttaagtctttaatcccttttgagtttttgtatgtggtgagagataagttctaatttcattcttctgcatgtggatatccagtttttctggcaccatttattgaagacactgtccttttcccattatgtgttcttgccacttttgctgaaaatgaattgagcataaatgcatggattcatttcctggctctctattctgttccattagttgatgtgtctattttgttttgttgttgccagtaccacgttgttttggttattatagtttcatagtatattttgaaatcaggtggtgtgatgcatccagctttgttcctttggctcctgattgccttggctattcagggttttatgtggttccatatgaattttaggattgcttttctatttctgtaaaaaaaatgccattggaattttgataggggttgcactgaaactatagattgctctaggtagtacggacattttaacaatattaattctttcaatcaatgaacatgggataccttctatttatttgccttgtcttccatttctttcaccatctcatagttttcagtgtacaggtctcaccgtctgggttaaattaattcctatctattgcagtcacacatttttttagtggcagcactcaccttcttgagtgaaccatggaggttgtggcatttgcttgtcaagggccttgcattcctgggggtgccccctctgctgttgtggtatcctaggatggctgtcaatccctaaacttgctcccttgcggcccaggagccacaagaacatctcattccctgcccagtcactggtcaggtgcaggccctgacccattccaaaccacggccccctcctacatgcttttctctggtggaagattctctcttttcatgcagattggttgctaagccctgtgaacaggagtgaacaggtggacaagcagccatcccaacaccacacaaagagagagaaactggagacaaaagcagcggggagatgctgcagatcccggccactgtgccagagccaccctgggttcgccattcacagccccagagccaccctgggttccccattcacagccccagagccaccctggggtccccattcacagccccagagccaccctggggtccccattcacagccccagagccaccctggggtccccattcacagccccagagccaccctggggtccccattcacagccccagagccaccctggggtccccattcacagccccagagccaccctggggtccccattcacagccccagagccaccctggggtccccattcacagtccagtatgccccacgtgagtctgtgttggcttctgtcacttgcagtcctgagtgctgagctgggccaggcccccaacacctgaggtccttccctccctcacagagttttcatgctcagttgtgaggtatggtgatggccacaggcccgaatcctaaccaccacagcacaggacttctcaaagagaccgtcactgtgtctcctgccccaacaaggtgaacagttctgggatgctaatccccactcactcattccatccccatcctggagcctcctggacagattccatcattaccctccctcaggaggaggcagtgctgagggtggcccacgtcactgcacccctgggtggtccctgagggcactgctgagggtggcccacgtcactgcacccctgggtggtccctgagggcagtgctgagggtggcccacgtcactgcacccctgggtggtccctgagggcagtgctgagggtggcccacgtcactgcacccctgggtggtccctgagggcagtgctgagggtggcccacgtcactgcacccctgggtggtccctgagggcagtgctgagggtggcccacgtcactgcacccctgggtggtccctgagggcagtgctgagggtggcccacgtcactgcacccctgggtggcccctgagggcagtgctgaggatggcccacgtcactgtgctccctgggtggtccctgagggcagtgctgagggtggcccacgtcactgcacccctgggtggtccctgagggcagtgctgagggtggcccacatcactgcacccctgggtggtccctgagggcactgctgagggtggcccacgtcactgcacccctgggtggtccctgagggcagtgctgagggtggcccacgtcactgcacccctgggtggtccctgagggcagtgctgagggtggcccacgtcactgcacccctgggtggtccctgagggcagtgctgagggtggcccacgtcactgcacccctgggtggtccctgagggcagtgctgagggtggcccacgtcactgcacccctgggtggtccctgagggcagtgctgagggtggcccacgtcactgcacccctgggtggtccctgagggcagtgctgagggtggcccacgtcactgcacccctgggtggcccctgagggcagtgctgaggatggcccacgtcactgtgctccctgggtggtccctgagggcagtgctgagggtggcccacgtcactgcacccctgggtggtccctgagggcagtgctgagggtggcccacatcactgcacccctgggtggcccctgagggcagtgctgaggatggcccacgtcactgtgctccctgggtggtccctgagggccccccgggccacatgaggcccacccccttcctgatgtccaagaacaagggcgttactagcgctcacgtgttcccctttgcagactaggtcacaggatacagcacggattccttccggcaaaaggtgctcagtaaagtggattgcagcatcctgtgtctcccctaaaacatcctcaaacagaatggctgcaccaagatgtatgggatctgtaccaagacatgggtaaaaagaaggccctggcatgttcacctgattgttactcaaaagccccacagatggaggctccattgagcattgaccctgaggccctaagagttgctgcccgaggagagatgctcaacatcagccggcacttccatctccgctccctctggcaggaacaaactccactgaaacaggcggctctttcccaagcaggggcaggactggctggttgccgtgttcccaggaaacatgtacagggtacctgcttcacccaggaagtgcagggaggttggaatgaaacctcagaaggatggagaggctgctcagaagatgctgactgcgggcctgcttctggtgtctgactgccgtctgcacccagaatctgcctgtcaattttgtcttcaatgattttgaaactcctgggggtgagggagctggagacaaatagtgacttagagtcccataacacatttgtccccatcaccccattggatctcagggctgcctgtgagccaggctgtgcaggaaggaaggtgccagagctgctgcctaaggtgccctagggacaggagagcccctgcctcctgccggccactggatccacgcccagtggatcagtcgctcatcaccggccaggccagtgcctcgcctcacctcacccagcctcacagttcagatgaggaaacagacccagaaggagcaagtagctggattctaggctatcaacaaaatgccaaaggcagaaaaaaccctgattttccaaaagggaaaaaaatgttggaatacaaatcaatttgtctgctgtttaccaaagctcattctctcccccagcgtttccaaatcccacccggcacacctgtggcccattcaggtgccagttccgtcaactgcctggaaatccctgcagagaacaacggcacacctgagcctcttccagagcccacagttatcccattacgaaatgaaaagctgctttggggaatgctgtgttgatgtgtcagcatcaaactgttatgcgggaggcagaaggacctcaccgacggcatctctcgccacctcgagggcacgggtgaggtgcaggaggaactcgtgctaccacctccacccacccccaggggttctgccccttcagaaggagggtccaggagggggactcacccgctggcaccattggccactgcacactattccccagctccctcctactgcaccccatgagccaccctcagttgggccccatccctgagtcccttttgggttcctaattgttgggcacagtctaagcccagggctccctgcaggcctgcagctgtctggggcgactcgtacactgtacctgctttccttcgttgctcacacagcagccgacacagtcactcaaaactcccatttgtgaaagtaagtggccttttaaagaatgctaaaacattacgggcactttagccccgcgtttcttactacacgaaacatggttacctacgagtgaaatggcagaaggaatgaccttattaacgcctcatccttctcaagggcaagagagtgcaactcaacaactccatgtgaacacctgccctggcatgcaggcagccgggccagtccacagccagtcacggccccacgggaggagccttctgagtgacagatatcattttcattcaggggggcttgaactctggccatcagaagagctggttactacaaaggtagcagaacaggaagtactgagaagaaagtgcacctttctgaccacccactcccagcccagctcccctcctgtctgctcgcctcctgtccgctcccctcctgtccgctcccctcctgtccgctcccctcctgaccgctcccctcctgtccgctcccctcctgaccgctcccctcctgtccgctcccctcctgtccgctcccctcctgaccgctcccctcctgtccgctcccctcctgaccgctcccctcctgtccgctcccctcctgtccgctcccctcctgtccgctcccctcctgaccgctcccctcctgtccgctcccctcctgtccgctcccctcctgactgctcccctcctgaccgctcccctcctgtccgctcccctcctgactgctcccctcctgactgctcccctcctgtccgctcccctcctgtccgctcccctcctgactgctcccctcctgtccactcccctcctgtctgctcccctcttgactgctcccctccctgccagctaccctcctgaccgctcccctcctgtccgctcccctcctgaccactcccctccctggccagctactctggagcaaacttacacaagcacacagcaggacccaaggatcagcttcgataggcattttccagaagtgcattagaatggctgcttcaccctcctgtgatgatgcctggaccctgaggtgggtcaggcccctcccgtgctgcagccgattcgtggctggattaaacttcttattgccccctgaaggtgaggtcaggcagcagaagcatcgtgcagctaggaatagaaggctctgggccccacacatttcagagaggcgtaattggggtaggctggtattggtaatcctgagtacaatattgattgacaaaaacgaatcacacctgagcctcaaagctcttagcccttccctgcaaagaaaactctctcttagaattaccaaatatagctttcaatcccttcaatctaaatgtttcaggtgagagcagagatagatttttcgaatggagacattaacctttctgagctgcagctgcctggctctctctgcctgttactctgtttctggaacatggcagctgctttcgccgcaccagggcctgcaccaggccacccagttacattcaggccaccctgggccaataggccagacactcgctcctattccgggtctcctaacagcaggccaacagatcacaccctgttagtatttagaataatcaagatttttatcagaagttgaagagaacagcagcatgtatttcactcaggacccttcattttacaaataagaaaactgaggtcctccacagccgtgctgcccactgggagcaccccctgcctcacaccacatcatccaataccacgatgcagatgtggtcctcactcttggccctgatggggcactctagcatcccactgttttccttaatagaaaacaacacaatagaagttaaggtcagagtcaaaagatgacacatcactcggggctttataaaatccaggactcatgtaaacaagtcctaaaactatgagtggacattcacttgctaagcacaatgttgaagttatggctgaaagcttactttacatttgcctaagaccacacttgtcatacacacctaaaaccatctgctgtcttctgagttctattaaaggacaatgagaaaacagcaattgaaatggggtttctggttccaaacggcaggacaggagcaagctgtctcaccaccccagcagaaacctgaaagcaaacatgcagtgctgagatgctgagatggtcaccagcaacatctgagaacccagaggtgaggatgagtcaggtcctggggccaccaggaacagaaaaaccccgaacagacagacagcaggagaaccagacccccacatctgcaaggcccctccccataacctgcctggcatccagtacacaaaagattttcccttgacacagtttctacacttagaaaggtgagataacaacagcttgccctgctcttgggtgccctggcaggagacctctccctgcctcaacccatggggagcatcctgagtgcctgaagggagaaacagccctgaggatggccagagacaaaggtgggggtggggctactgtccccagccctggaaactctgctctgcaactcggccaaaggaggcactcaatcagagtggccactcgcagccccacgctgcaggacctgtgctcccaggtcccctcccagccttcccacgttatcaggacatcccctttgggacatctgctttgggacaggcagcactttcatcagtgaccagagctgagttgaacctgggcttaaggcgccatctagtgccaaaaaggaggctgcaacctagcaagaaaacactccacaggtaaatcacaaagaatctttaagcaaacataccccagaaaaaccaaaacacccagacagagaagagataaataaataaccgttcagtgccaagacacagacacacatcaacaaaccagaaagcagcagacgggaccatggcctccccaaacggacaaagccaagaaccagtgactggcccaacaaagtggcgatttgtgagctctcatcaagaaatcaaaatggcagccctaaggaaactcggtgatccccaagataacaccaggaaatcaattcagaaagttaacaacagattgaaataatttttaaaaatcagacagaagtcttgaaacaaaaatacatttagcgaaatgaggaaattcatgacaagctcccaacagcagagtggcttaagcagaggaaagaatcagtgagctcaaatacacaatcagaggaggaaaaagaacaaagaatgaaagacaacctacaagatagagaaaattacctcaaaacaccaaatccaagaattactggtgttcaagagggagctgagtgagaacaagaggtaccaagcttactcaaagaaacagtaacagaaaactttctgaaacttgagaaaggtatagataaccagattcgggaaagtcagagaacaccagattcaacccaaatatgaccacctcaggcttttaataattaaactgtcaaagctcaagggcaaagagaagaccccaaaggaagcaaataacatctaaaggagctccaatttgtttgtcaacagacatctcaatggaaaacatacagaccaggagaaaatgggatgatactttcggagtcttgaaaggaaaaaaaaaaaaaatctgtcacccaagaatactgtatccagcaaagctacccttcaaatacaaagaagagataaattctttcccagacgaacaaaagctgagagaattcatcaccaccaaacccaccttacaataaatgctgaagagatctcttcattcagaaagaacaaaaatacatcgaatggggcactaagagggcagattctcattccaccttgccaccagcctgctgtgcaaacttgggcaaatcacttcacttctctgtgcttccatttcctaaattgagaccaatgaattcggtattttctaggatcctttccaatcaaatgttctgtgtttgcatgatgatagctagggtgctgcagcataagtgtctgtaatttagcttttgtgagctgtgaacattgcctgcctctctctcactctcctgccagctgctcacactgtgtcatctgtccgtttgtgtcaacagagaactgaggaaatgcaactgcagtgcagccctgcaatgggctggccaccagcaacaacggcaggagaggcaggagcagtcaggcaggctgggccccagaagcacgcagtggagaagcccgcagcagtgcagagggatgtccttatgagccaggacagagtcccctcatttgctggactctgcagaactacactggctgcatccaaaacccagtactcaccaccagatggcaacagggagaatctgcgtgcacaggagccagcctgaaggaagcatccagggaacgcaggggaagagcgtgagcgtgaaccccaagatgatggggtgagacctcgctcacaggcagatgcgaatcctccacgtggggatgcgggaaggctgttcttgccaaaggctgatgatgaccctgctgcctctctgcttatctgccctcgaaacagaatgtggttccaggcgccaccacccagcctagcagccgtcatgggcccacagtgattgagccctcaatcaaagcttttttattattatggaaaattacaagttttttcacaatgagttttcacacacatataaatcaatggaaaatgtcttcttggctgtctttatggtatttaagtaaatgattaaagttttcacagttgggataaaggacatccaatgtaaaagactgccatttctgaaaataaagacaatacaagctggtcatcactgttgacaaaaatttcctcgggaatctaaaataaccaacaagtcactcatttccctttgtctaacctactacatgcattttttatttataaagccccactcaacttatctttttcccctttcatcctgaattctgggagctcaaaggcaaccttaaggcttagttgcaggaactctgttgaccttgtgggaacatttgcttctttttccttccctatcacattcccacttcaaattcatcaactcatagagtatctttttgttgcttccttgggtttttttggacaaggaaagttgaacataatcaaaaacaacagtggtgaagtcctcacccaacactgccagcaatctgtggagcacagggcttcccacccggcagataagaaccccatgcacacctcttaaataaacaggctgatgctgagcaggcaccaccatccaggcaccatgctgagcgctgtgcgtaaagaaaatacaaagatcagccagacagagcctgtgctgcaaggagcccacattttatttgaggggccagataggtcacaattcataacataacaaagcaaaaggtgaaaagagctaaaaaaaaaaaagtagaaataatttctgataaattttctcttagcttttctatggggaaatcaggagaaatggactgactgggagaaagcttctggggaccaagtaaaacccatcacgatcatcatcgaaactgtggctgggaagatcctgggccccagcacagggtcaggtgggctctgtgctggccgggagagcggcctccgtctggctaccaggcctctctggactgcagagttagtttttctgcaagtaacagagtggaacccaatggcaggaacatctccaattccgaaattccatggtcctgtgcaaacaaccagaaaatagaaaccaagatttgaggacggaagaggaaccggacgaatgatgtgaacacggggcttgtttgcaggtagagtttactgggggaaagcatccacattacataaaagagaaaggagacaaaacgacgcccggcagtgggtgcccggcttgcaggcctctgcggcaggtctgtgggttccctggcccagcggcaccacccaaaggcgagggccaggctgtcgttgacgccctgtggcagcacctcagtgatttcaggggtggttttgactctttctgtggaggtgacaggaggtgcctccatcacagacacaaatggtggcttcctggcttgctcggtagacgccaggctatgctcaccccaaggccagaccccggacaaggccaggggctggcccaacactggccttcagggtgctgggcaacctgcatttgctgcgcagcccaggcccacccaaatcactgagggcgtcacacaggcaccgtcagctgcgggtgctaagaaaagcggcaggagaggaggaaggcagcttatctgtgcagccgtcagccatcagcaagcctgtagcagccactgccaagcaaccgggacccagctcttatgtcccgtaaggttccagggaccattccggggagaaagaagggcctggtcccagggcaggaagctcacaaggcaggaggcgcattgcgtccagcaggggtgtcccattgggacagtggcggctctcagaacccagccgccagccctcaactctggctcaccgtcccaccaccaactagagggccccggccaagccaagggcaaagtaggggacacacttacaatcaggggtgcatggggctcctcccctccccttgtgtgtgcatgtctctgtttctctctttctgtctctgtctctctctttttctctctctggccctcccacaaggcttaaggtggctccttagaatggaaggcccaactttgtgagttactcgaatacatgaactcagcccaggacagtgggaacagcagcccggctcacccctgcaggcggggactgggtgcccagcaagcctcgggaggctgccccaaaccaaccacagggagacctgagacgccctacgcccacctttcttccggcctggtcttaaactggtgggaggggcgtgggctgaggtagccatggggggccctctttcctgccctcagcttcacctttttcaggagcatggcctggaagctcagccattctcagaaggatgggctggaggagggctgcaggcggctctgcccttcctggcctccagagacacactgaaagcccagttatcacaatattcggccgacggaaatggtttcatgaaaatttaccagacttgaaagcaatgactcaaagaaatacgtgtatgtacccccacgcacacagcatgttattcacagaagccagacacagaaacaacccaggcgcccagcagctgaggggtggagaaacagaacgtggtctatttacacgacagaatgggactcagcctcagaaaggaaggagacgctgacacagtccacacctgcaccagccctgagcacgcggtgctgcctttagcgttcggctgcagccgggcacatgctccgattgcactgatacgtggcccccagatggtcaggttcacagaaggtacactgagtgcagccagggccttggggagggggagtcagcattaatgcgcacagaggttctgtttggaatagaaagttggcaggtggatggtggtgatggctacacagcagtgtgaatatcctttataccactgaactatatccctaaatggttaaaatggtcattcttatgtataagttactgaaagtctttaagaagtgataaaaggtttactgaataaatgagaaactggatgggagggacgccatccccactctaaggagtctggactatgaggttgatgatgagcatgacctcaaggccccagcatagctaatccaaccacaggaaggcaggcagcatctgggaggccccatcagcaaggccatggccggcgagtccctgctcagaccccagaaatccaaagtgattcacgcacaggtgggaagacgctatcaatactcacaactttaaccagacacaagtctacagaggcgaccatcactaacgttgaaaatgtcttggcttctgatttgaacaggatcagacctcaagcacgaaatgaatgctttaaataatggatgttttttcaagaaacttaatttggtatcacattggccaagaggtcatttggcgaggccaacacacagtcacaaaggaaaggtggtcctcagtgccacccaggcactccgctcggccagccggggggacccagctggagccataaaaggactgctcccaggtcaacacgaaggcctgcccaaggactcctgcggccttcaaagatttgcagcctgaggacaactttcagcaacaccgcgacactctaggttgttttttcaaagattaaacataataataattctgtaaaaccaacatgggtcatcattaattactgcaccgtgaccatggctatttaaaaacccagcctcagcacagtagctgacaaacattaatgagcagtaatgtacacgtggtgttgtcgatgaacggataatgaaagcaatttatttgaaaattaaaacatgattaagaatggcagcccaagcgagagcccagatgcctgaagaaggcattcctgatggaatggccttcttcctctgacagtttttaatatacagcaccttagcttggcccctccttggtgcccaagacctaacactggagatgtcagctgtggagagtgagaagacaagcccctcagtgggacatctcacagcgctccttaagagcagcgtgtgaaggggacacggacgctgcatccttcctcacccagacaacccacagatcccaagtccacccacacccaggacgacgcacagaccccacatccaccctcacccaggatgacgcacagaccccacatccaccctcacccaggacgacgcacagaccccacatccaccctcacccaggacgacgcacagaccccacatccaccctcacccaggacgacgcacagaccccacatccaccctcacccaggacgacgcacagaccccacatccaccctcacccaggacgacgcacagaccccacatccaccctcacccaggatgacgcacagaccccacatccaccctcacccaggatgacgcacagaccccacatccaccctcacccaggacgacgcacagaccccacatccacccacacccaggatgacgcacagaccccacatccaccctcacccaggatgacgcacagaccccacatccaccctcacccaggacgatgcacagaccccacatccaccctcacccaggatgacgcacagaccccacatccacccacacccaggatgacgcacagaccccacatccaccctcacccaggacgacgcacagaccccacatccacccacacccaggatgacgcacagaccccacatccaccctcacccaggatgacgcacagaccccacatccacccacacccaggatgacccacagaccccacatccaccctcacccaggacgacgcacagaccccacatccaccctcacccaggatgacgcacagaccccacatccaccctcacccaggacgacgcacagaccccacatccaccctcacccaggatgacgcacagaccccacatccaccctcacccaggacgacgcacagaccccgcgtccaccctcacccggggtgacccacagaccctgcatccaccctcacccaggacgacgcacagaccccacatccaccctcacccaggacgacgcacagaccccacatccaccctcacccaggacgatgcacagaccccacatccaccctcacccaggacgacgcacagaccccacatccacccacacccaggacgacgcacagaccccacatccaccctcacccaggatgacgcacagaccccgcgtccaccctcacccggggtgacccacagaccctgcatccaccctcacccaggatgatgcgcagaccccacaccctggcaacccacagaccccgcgtccaccctcacctggggtgacccacagaccctgcatccaccctcaccaaggatgatgcgcagaccccacaccctggcaacccacagaccccgtgtccaccctcacctgggacgactcacaaaccctacgtccaccctcccccaggatgacccacagacgccatgtccacccctccccaggacaacccacagactcttcatccatccttgcccagaccccatcacagctggctggagaaggacgctgtgaaaacctcttttgctctttcttgctgctcaggccatccacacctggcagaaatccccactgcccagttccactgaagccctgggctccaatattcagacctgagacccaaacagccctccagagagagctgagccacagacgatctggagccccggagccagccctgccctcaggacaggctgttagcagatgcccaccatggaccttgggggcactcccggaccctcctgggggatcctaggcaggcatggatctgtgttcccccaacacagataccaacaagggccccaggaaggtcagtgcctggagccaggtgtgggctcaccttcaccacagatggtctggctggggcaggccctcctgagaacctgagctggcactgcccagtcctcactgtgtctctgcctgagccctgcctctccctcatccccctcttcccagctcttcccgctgagcctggaccctgcctatggagctcatccccgcttctctcctcccttcgtttcttggccctgaatcccagccccttccccatcgtgggttccatctttcctccgtctgtctgtcactcatcccgtccctgcacctgtgctaccatcaacctcccagcctgggcctcttttccattaacaaacagcccagcccagactagaaatgcagagaagccacagctgcaccagcaggcaccacctttcctggacctccatcgccccagctctcctaactcagctctgggctgtccagaggaggaggcagaagaggccgcccctgcccgcccggcctcagcctggtgtctcccaaggccagcactgtcctgtgtggcaagaggatgaagggacagagcccctgtgcccggcactttcctcaggccaccctggccccaaagcacaggaagaaaaaaatgtccacaactcatttactcacagagaagaaaaatttgactttatttgtaattaaagatggcctaattaaggcaatgtgacaattctgcccatcagacctcagaaaggcaaaggactttgtgggataactcaggttgctggtgaatgacatggactcatctacattttgttgggcacaaattaggtgtcccctctgcaagggacaaatttgcaacttgactgaagttttaaaatggccaagccccaggagccccagtttctctgctaaagatatattctaaggagataactggatgtgcgtataaaaccgtaagtcaggtttgtccatcacaaccacgctcatcctggtgaaaatgcagagaatcagggaactcgagtccagatgagaggtagtggagaaggaaggcaggggtctgaaagccctgcagatttccaagggttagtgttcacttctggggcccaaacatcccaggggcagtagccccaaagccccagatgggactggctcagtcaccgtccctctggggaccttgagtcagaattaagagtcagaattaaagagaagtctcaaaacgacgccactggagacacaatcgcaattcaggccaccatgttgtaggtggccctggtccccatgatccatggaacagaggcggccccagctgtctccgcaggattatgcaccgcgcgtcatgagccgagggggacaggacccgtggagcaccactctcgaaagccctttccctggggccagatggccagcaccatggacagcagctcgccagccttcgctgagcctccaccagagaggcaaggggaggacactagggaggccaggagaggctacgggaggacgctcgggaggccacgagaggctacaggaggatgcttgggaggccatgagaggctatgggaggacgctcaggtgctcgcagaggccctgagaagctatgggaggatgctcggttgcttggggaggccgcctcctccagagcctctggaactaagtcacacccacgctggaaccactgcgagcccaatttcggaaaaaacaaaacatacaagtgaaactcagcccacagctctgaattcattctctgaccagagaggtcctgcagccccgtcgaagcctgcacacaattcctggtgagcgctttcctgaccacctgacctggaagggcctcacccagtcttgatcgtcacatttcccagacaaacataaaatcgtgcctgcctaggagagaaccgcgcatgctgatacagtgagacaggcagggtgccagaactccgaggtgagacacttagggtgtcccagggcgctcggcccccagagctctgaggtgagagagccaggagaggtcgggagggggcggggcacgggcctgggaagcggctggcctgcagctcaggaaccccagtgtctgggtctccacggatgcctctggcaggtcagggagaggaggtggccgatggagagagtggatggaggagtctctggtgttgatcacagtggactagaatatgacagaaaaggggacttcaggctggcagacaaccacacacacacatgcacagacacacatgcacatggggagacacacacacgcttccccagacatcgcctcctgccggacgctgtttcattcttctctttgaaaggcgaacgatgaggcagtcagtgaccttctagccaatggggctttgggaaccaaatcaattccttaagaccaaaaaccctgcctctcaccatgcttcccccagcagggtctgcagagcccccatcctcacttcatctgcctctcgccatgcttcccacagcagggtctgcagaacccccatcctcacttcacctgcctctcgccatgcttcccccagcaaggtctgcagagcccccatcctcacttcacctgcctctcgccatgcttcccacagcagggtctgcagagcccccatcctcacttcacctgcctctcgccatgcttcccccagcagggtatgcagagcccccatcctcacttcacctgcctctcgccatgcttcccacagcagggtatgcagagcccccatcctcacttcgtattcaggtaagtgtgaccaagaatgtctctttttctggtttataaatcaattttttaaagatctcctaagatctgagaatacaagcaaagagacagtcacatgtaagcttaataatgaggttcatattaaaggcagacagatgttcaattaaacatcagacttcacgctgacacgctgagagtgaggatctccatgcataattctccgtcccagccccagatcccgggagttttgatcacacagctgggaagtcgtcatccaagcctcggatgtgtttgtggggcatcgtctatagccggggctcctcccctctctctgtccacacacacaggtctccaggcatgtttacctctaaatacacaccctgccaaggactgtggcctggaaagtcataggcacttgacttctaccaaaaaagaaataacggaacggcatgagaatggtcacacctgagcaggcagctaacagcaacaggttcactacacacaaccacccttgcacatatgcgtgtgcacccacaacacacacattcacacacacacacgcatgtgcacacacaacacatacatacattcatacagacacacacgttctcaccctaaagtcatggtcaaattgggtggtttactccacactattttaataaatagccttcactcttcagacacaatctgaaaaaaccccagactcgaaagcgtttcccataactcaggacaaggaatcacgcaagtgggaaaccgtccttgcgagcgcctcacgtgagccacagtcaccgcacaaagtctccatcgcgttggacggtccgtgggaatttctcagggctccggaggccagcggggctggaggcagacctcatcggcacttctgacaacggcaatttttgtgctcctcacaaccaacgagggtgtgatttttcccatctgtcttcccttcctcacccctcccttccccttctcttccctttgtctctcctccctctcttcctacaaaagaaatcacatgacatcgattccctgatattcagatcaatcagctggagtgacaggaaacacgttcgctcccattggaaacagcacgtgctccagcagagctcaggtgttgttgaagcccgttagaactggcatgcgtggagtctgctcccatgcatgcatgcacacgcacacacacccacagcatccctgggagaagccgcagcccaatgcacacgcacacacacagcatccctgggagaagccgcagcccaatgcacacatgcacacgcacacacacccacacacacacagcatccctgggagaagccgaagcccagtgcacacgtgcatacacacacacacacccacacacacacagcatccctgggagaagccgcagaccagtgcatgcgtgcacacacacacacccacacacacacagcatccctgggagaagccgcagcccaatgcacgcgtgcacacacacacacacactgcatccctgggagaagccacagcccaatgcacacatgcacatgcacacatgcacacacacccacagcatccctgggagaagctgcagcccaatgcacgtgtgcaaatacacacacacacagcatccctagaagctgcagcccaatgcacgcgtgcacacacacacgcacacacacacagcatccctagaagctgcagcccaatgcacgcgtgcacatgcacacacacccacacacccacagcatccctgggagaagctgcagcccaatgcacgtgtgcaaatgcacacacacacacagcatccctagaagctgcagcccaatgcacgcgtgcacatgcacacacacccacacacccacagcatccctgggagaagctgcagcccaatgcacgtgtgcaaatgcacacacacacccacagcatccccgggagaagccacagcccaatgcacgcgtgcaaacgcacacacacccacacacccacagcatccctgggagaagccacagcccaatgcacgcgtgcacacgcacacacacccacacacccacagcatccctgggagaagctgcagcacatgtgtaagctgccaataccctgcacacggctctgtgactggagataatgaggaatcgccatggcaacccgggaacaagcccacagcgccttgtttccccgaacgcagagccccggcagcccctccatccaccgagacatacacggctggaaggacgtggtgctgcggaccatgggtggttcttctgccacatttgctgggacttgtcctaaggacattttcaatttctgaaatcagtcgccattgacggccagggttctcattcctgaatttttgtctttgcttctggttaccagagatccaaagctgcagtcgtttagctggtttctgtttccaggggtattgtgaatggaaataaaccatgaaaatgaccgaagacgtcacaaggaaagcaaataggatttaaaacagcaaagcggtgcctttgccaattccagggagtgtttctgctacataaccctgtctgtgctgggcagtgccgctcccgtgcacccaggactggaaaagcatagcttaggggttcaggggagaaacagtgacctctgcatcagaaaagtcctagataagttgccaggaaaggcaacagcacctggaatgagagacaagctcaggactcgtgccccaggctgcagggacacccacagagctgacttctcctcggtcaaccagcccccagtgctcggaagcatctggcccaggcacaagcatgctcctgctgctacggcagctgaattgggaagtatggcgggggcacagatgccccaggtggacggccaggcctctggtccacacacaggcattcactccccatgtggccatgagcccccgattctccaagtcctgtgttctcacctgtaaaatacggaagctatgctagacaactgctgacttccctcacctgagctctgtggtactcagatatcctcactggtgggaaagggaaaggccacggccatcatgggcaggaggacgcagtggttcacaggatggaggcaccaactgggaggctgggcggtggcactcacactgtgctggagtcaggctggctcctggggagcacgtcagtcacctgcttaattcaccatgggttagctctccgcgggcgaaggatgacgaaattacgttgtaagtgagcctcagcattctgtcctttggaaatagccccaagaagtctgggataagctctattaatgttagtttttttccagagagtaaaaaataagctcttgaacccatccatggctatcagaatgaaggaaaagtcgtttgacctccttggcccagagcccatcagatgctcagtcattcccctctaaaatgcaactctctccataatgagttcattttcaaaagattcaattatatggaccgtttctccagacggtttacaaatttcaaccatggcagcagcatttgggaatggctcatctgctcccaccataacttagggccatgttcctgtttcaagacaccaaattcctgagtttgactttcccttctgcaagtttcccagaggaggaaaacctttaaattgagctgaggaaagaacaatatttgaccagcaccagaagtcaccgagcattttaatacaaaccttattgatgaggctttactgtccacaccactgcatatctaagtcagagaatttgtcctgtaattccataacttcaacagggcaaacgtttacagtacaggttgattctagagcctcctgcaccggcctcccaggatattcggcagcaggctgaacccaactggaacatccctaccaggagagaagcgggaccctgtaacagctgccacagcttccctgggaggcccccgcttgtgttgacttcagagaagcaaatcttgacttttcttagcgactacctaaagctttcattacaaactttcttgaaaaagaaaaaatggtattcctaccagcatcactggctgggctagcactgatcacagtgatgaccaggtagatgaagtagggtttccatacatgatggaagccgacagccacactttgaaaagctcagtgtggacttttaggtgaagttcatatgaaactgttagttcctggcccggcccgcccgcacagtaaatgagaaatgacaggtgtggaagccaggaggccactgctttgctgcacagggacgtccaaggaccaaggcacagagcagctggggggctccccagggaggaaggacagcactcagccccctcccctgcaggtccctcagagacccaaggcccagctgggccccaccatcctcgaccccccaagtcttcctccttgctgtggccacacagaaactgtaattttaggacgagagctctgccagacagaggtgaagaggcaggaattgtgtggggtccagaggaaccagagtgtgatggttaacactgagtgtcaacttgattggattgaaggatggaaagtattgatcctgggtgtgtctgtgagggcgttgccgaaggagattcacatttgggtcagtggactgggaggggcagacccaccctcagtctgggtgggcaccatctaatcagtcgctggcatggccagaatataaagcaggcagaatatcgtgacaagactagactggcctagcctcccagcctacatctttctcccatgctggatgcttcttgcccttgaacattggactccaagttcttcagccttgggacctggactggctctccttgcagacagcctattgtgggaccttgtgatcatgtgagttaatacttagtaaactcccctttatatatatatacacacatacacacacacacacacacacacatatatatacctataaagttatatacatacacgtatatgtaactaatatgatatatatatatctgcccctctagagaaccctgactaatacacagagtgtccaaaagtgaatcactcaacacatggtgagggtgccgggggtcagaacaggacccccccaacctggggccactgggcagatgctatcagcaccaggctgacttgaggccacacatggcatctgcctgaaccgagaggaaacgcctcccactgtccagtagagaaagtaaaagggccaaggggaatctgctcattcaccaatctgtttattggtaaatatcagccctgattacacatttcccgttataaggataaaaacgtgaaaacatagttacaaacatacacagagaaactggaacactgaaacagaaaaaccatgtgagagccacaaaatgattctgtagcacggaaaaggcaaacctacattgaaggtacaggaaaataaataggttttaaaaattacagttggaaacccatgtaaattctaaaaagcatctgatttgtgttctcaaatttaagaaaatgacaaccataaaaagcaagataacagcactccagaagtccccgacctgactgggcggcagacagactgagaaggaagtctgtgaagaggacagtgtggtctcagcgggcaggaggcccagtcagaaacaccgagggcagaactgtcccgggaagtcacctcagtcacacgaaagccaccgtgaacaggagcttagctacagacgatgggaacgaggtgatcaacactgcaggagaaactggtgcacggcggtgactgactggggatttggcataaggacaactgccttttaaaggctgggagaggccagcgcagtggctcatgcctgtaatctcaacacttagggaggccgaggcacaccgatcacctgaggtcaggagtttgagagcagcctggccgacacggcaaaaccccatctctattaaaaatacaaaaattagctaggtatggtgacacacctgtagtcccagttactcgagaggctgaggcaggagaattgcttgaacctgggaggcagaggttgcagtgagccgagattgtaccactgcactccagcctgggtgacagagcgagactccatctcaaaaataaaaagaaaaaataaataaaggctgggagggctgggcgcagtggctcacgcctgtaatcccagcactttgggaggccgaggcgggtggatcacgaggtcaggagactgagaccatcctggccaacacggtgaaaccccgtctctactaaaaatacaataaattagctgggcgtggtggtgggcacctgtagtcccagctactcaggaggctgaagcaggagaatgccataaacccaggaggcggagcttgcagtgaaccaagattgcaccactgcactccagcctgggtgacagagcgagactcctgtctcaaaaaaatttttaaaaatcaatcaatcaataaaggctgggagaaccagaataaatgaaagaaagcaacatgcaaaagtggaatacaaaaaaacttccacttccaaagatgctcatctgaagattcagagtttactaaataccacacaaaattaacaatttttaaaacacccttacacacaactgtttttgaattctaaagaatcaaacgaactatcacaatgaaagagttttggtagagcagcccattataagaaaaaaagtaaaaaatgtagcagcaattgtcatttgggaaatatgagaaaaaataatctcactcggtcataacgaaaaattttcagatacctaggaacaaacttgaccaggtatgtgactgcgcagggaagaaacacgggcccacagtgtggacaaggataacacggccaagtgaccctgacagcaacatggatctccaatggcttagatggattcaagtaaaacctttttttggtaggaaaaatttaggtgaaaaaaaggaaggaaaaaattaggtgaatagttatcagatcctataataagagagacttcctaaacaagcaaaggaaagcaaaaaaaaaaaagattaatttcacttcatgaagatttaaccttctatttttaaatacatgagaataaaatatatccttatgttttatttgattaacatttgtaacaattttaccaataaaattcataaaagaaaacataaacttagcataagaaatgaaaaccaaaacgaggaggcatattttcctacacaattaaaattcttcactaataaacatccacattgatgaccttgtgacgcaacaagcacctcacgcttgagagaggaactttatgcaagttctcggaaggaaaattcagcaactctcaaaaatgcacacaccaagtgacctaggaatttcacttctaggggaatgttctaaggaaatgattcatatgcggaaaaccgttcgttttcaaagatgtgcttactaagaatcagacattgagaaacaaaggaatttccaaccgtaggtgaataattaaattacaccacattaaagatcatatttataaaacagataacgtgacatgctcaagatatagtacttattgagaaaaggaatataaacccatggatgtaattttctaaaagggagagatgaacctcacacagctggacgtagcgcactcagcgtccgtcgtggccccggggatgaggttctgtgagtcacgccacagacaccctctgccatcagccctcctgggcgctggctgtgtgcggaagaccccctcgcagggccacaccttccggggatgagcacctctggctgagcactgcaggcacagagggaggcttgccccgagccccagcagctctaagaggtccccgtggagtctcacctgcccaccccgtgctggtccccagagctggacccccaacgctggtccccggagctggacacccccaggctggaccccggagctggcctccccagtgctggtccccagagctgatccccccaacgctggtccccggagctggtccccccaacgctggtccccggagctggtccccccaacgctggtccctggagctggacacccccaggctggaccccagagctggcctccccaatgctggtccccagagctggtccccccaacactggtccccgaagctggtccccccaatgctggtccctggagctgatccccccaatgctggtccccagagctggtctcccatgagctggtacccggagctggtccccccatgctggtccccagagctggtctcccctgtgctggtccctggagctggtccccccaacactggtccctagagctggtccccaccacgctggtccccggagctggtccccaccacgctggttcccggagctgatctccaccacgctgatccccagagtgccccaagacagccccagcatctagtcaccctctgattcagcttcatgggcatctcccttttggtttttatttctgttttttatacagcttgcattatctttaagtgcaggaaaaaatatatatattaagcaaacaaatcaaaaggcatgcatagtcctgacaggcagagttctccaggctgtgattcagcacccagggtccaagcagccacatagggctgctaagactccccgacctgacagcttccgggcatccctcctgcaatctggggccacctggccactctagaacaccgaaggtaacactgagcagggccactacagggaggctgccagaggatgcgctgcacagggcagcacggccgaaggttccacccagcggcctcttaaatcaaggacttccaggcagaggaaactcctgtggccacacccccaagatggctttgtctgtaaaggagcgttaacatcggcatttataagactaatatgacagcagatgtgctttcctctgacgcccgtacgctgcggaatcgcattatggaaatagagtgccaaatggatgccttgacctcggggcccggcctattctgcacaaagatgacttctgaaatgagttttttgctataatttgctcttgcctttgctaaaaggttgaaggcacttctattccaactgagtgtgagtaacgctaatttcatagcgttagctgcatgttcttaagcacgtttatcttcagcaagtacagttctgttgattgaaagaaagaaatatttctttttagtaaactagtattcccaaaggctgacagaccatctttgtatcacacacagttactaagggttcctttgcttaatctcttcagaggaaaaacagaccagctgccactgaagcaaacgaagtctctcctggcacccacatttggttgttttaggtttggagatggttttctgtgcaattaatgtgattcatccatctttgaaatgaagaattacactgcagtgcggccagttcccaccggatgaaagttgaagaaggagcaggattggaaatattcaaataaatagcaactgtttcagcccatgcacctgcagagtagcagccagcctgcaggccaggaaagggagacgctctcatccggcagcatctgggcgccctctctggatgggagtgtggggagggccctcccgtctctctgcgtctcagcctttgccaagcccagcattctgtctctgcctacctggtgcatggataactctcaaatgcacagatgagaagatgagacgctgtgggtgctgggctgggccctgagggaaacgggcagagtgtgatgactgttcccacggtggcaacacgacgcccacgcgcccggcactggagtcagggctcaggcagcgggcccttctgaccctcgcagtggcccttctgacccttggggcaagtgcacttaccatccccaccgcaaacagaggaaacagaatctagagctgaggggtttgctctgggtccaagcagcagtgaaggggaagagctgggtctcaaacaccaaaaatccaatcacaaagctcccttgtcaggaggagggagccacctccaggacagaccactggaaatggaactctccacaaacaccaactcaaaaggccaatgctgcaggccaagaacacactggcaaaaggctgcagagccacccacacactcactcgctcctgtgaaaccagaccctgcagctcctcatagacacacacctcaatatcaacagcgcagaaactccactcctggacactagcccgagagaaacaaaacacgatctgtaaaaaggattgtacaagaatgtttagagagactttattcataggcgccaaaaactgaagaaagaaaaaaagaaagaacaaagcccgtcaacaggaaagtgggtttgaaacatggcgcatccactcaatggaactcccctcaaaacagagacaaaccgtccacacacagcaagtggacagatggaggctggaggcagaaattaaagaatgccctgcggaaatccagaacagcaagctttagacctggagaaaccaagcatatcgtgcaaaggaatgggagaagtcatttccggggcggggatgtggtttcatgggaactttctgggtgatgtaaatgttctaagtcacagcacaggcaggggctgcatgctgggtgcatttgccaaaactcacagaattgaatacttcaagtctacagatttctactatatgtaacatttaactgggaaaatgtaacagaaaataataaagggtggggctaaaatcccttcctgcttaaaaacacagagcatggtggcctgaggcgcagaggaaaagatagatgagaaactccacatccccgaggctcagcagcagacgtatttcatgggggaaaccagctctcagctgcttcacgtggcagtgagaccctaaatatgagaggcagtggccggccagagcatgaagtcagaaaggtgcctaaacctggcagcactgggcctccccacagctcccaactcaccagaattataccaggcaagtgcccacagggcatcagcagagggcttgtcatgtgattcactgctcatttagtccctcattcagcaaatgtttacagagtacccaggacacaggcatagtccaggcacaatgagggcagcagacaaggcagctgtgtcttggggcagacattttaggagagcatgcaaggcagccaggctcaagctcctggtgtggccaaacccagccatctcggggatgtggtgggacagcacagctgaacattaaatccattgcaactacagttttccctgagaaaagcatcactgatatgggcaggtggcagaaaaattctgggtagaagagggtagttccccggcaaaggccccgccctcaagcctggaaacctgtggccctcaatgggaacaggcattcctgtttttgtgcccaaatgttgccttttggcctcccatgcctgcctatcctgtacccatgtaaatgccaagccccaggctccactagtggaagagcggaggaacagaagagtggcgtgtcagggaaggagagaagagaaggagcgtgtgaatgtcaagaggagttcggctggggacagtcagaaaggagattggctgcgggacggccaaactccaggggaagatcccttcccactccatcccctctccagctccccatccatcccactgagagccacctccatccagcagtaaaatcccccacatttgccatccttcaatttgtccctgtgacctgattcttcctggacgccagataagaacctgggtatcaacagggcactgagctggttaatacttaagccatctgtgggtggcaactgctaaaagagcactgtagcacacccaccgcggctttgggagtcacagacaccccacccctggatgctactgcagggccagagcccaaaagcactcaccccggctcctgcacctgcctatctgtgtgctctcccttccctaaggctctttgagcacgcagcagccaaacagatgagccacacccgtcacacgtcctgcatgcagggtcaggggactcccccacagccctgtcacacgtcctgagaggggggtcaggggactcccccacggccctgtcacacgtcctgcacgtggggttaggggactctcccacagtcctgtcacacgtcctgcgagggggggtcaggggactcccccatggccctgtcatacgtcctgagggaggggttcaggggactctcccacatccctgtcacacgtcctgagaggggggtcagtggactcccctacagccctgtcacacgtcctgagaggggggtcaggggactctcccacatccctgtcacacatcctgcacgcggggtcaggggactctcccacagccctgtcacacgtcctgagaggggggtcaggggactcccccacagccctgtcacacgtcctgcatgcggggtcaggggactcccccacagccctgtcacacgtcctgcacgcggggtcaggggactctcccacagccctgtcacacgtcctgagaggggggtcaggggactcccctacagccctgtcacacgtcctgagaggggggtcaggggactctcccacatccctgtcacacatcctgcacgcggggtcaggggactctcccacagccctgtcacacgtcctgagaggggggtcaggggactcccccacagccctgtcacacgtcctgcacgcggggtcaggggactcccccacagccctgtcacacgtcctgcacgcggggtcaggggactctcccacagccctgtcacatgtcctgagacgggggtcaggggactcccccacagccctgtcacacgtcctgagaggggggtcaggggactcccccacagccctgtcacacgtcctgagaggggggtcaggggactcccccacagccctgtcacacgtcctgagaggggggtcaggggactcccccacagccctgtcacacgtcctgagaggggggtcaggggactcccccacagccctgtcacacgtcctgagaggggggtcaggggactcccccacagccctgtcacacatcaagcacgcggggtcaggggatgctcctgtttcatcatgaatctggtagcaattaggtgcgtgtgtgttaataaaatctccatgtgttatggaaaaatagttaaatgtaaaatgtatcggtcttcaccaaagaagagcaagggatggccagtaagtgcaggaagagacagccagcatcatcacgcataagaaaaggggaccccacttggacaccaccacgaacccacaggctggggaggaaaccccagcaatgcagagtgctagggaggaggcaggcaactggctggctcggcttgggggtggaaatgcacacacaattttcccgggactcagcaatcacaggctttgtcatggacccaagaggaatgaaaatggagttcacaggaaaccggcatcggtggtttatcacagctttacgcacgacagctgaaaagtggaacaatccaaatgtccgcagctggagagctgactttcttacacccattccagggacactacctggtaataccaagggacgggctgctggtacggccctgcacggagggtgctcaagggcagggtgcaggcagaagcctcccccacagtccacacagcacagggcccgtggctacaacacagacacagcaagcacagcacagaaccagatccatgagggcaaggaagagctctgtgtggtccagatgtgacacagccagtcctggcgctagctccgggttttctgggtgtaacacagccagtcctgatgccagctgtgggttttccaggtgtgacacggcaggtcctggacctggctccgggactatacacctcctcctgactcctccagctgtgcacttagaaaccgcattttactgcatacaaatcatatgattatacaaacctgaacaaacctgacacaaaagcaaataaaagctattggcctcaggacaacccttgaccttgacaatggcttttttacataatggttggaggctgtcccctcagctcttgacattcgctccccagggcatgagttttcctaaaggggcctgcaagccccgcctgctgcccagaggcttccccaggcacctccttcttggtgcaggagggccctggacccactagggacttaagctccttttccacagaaacacagcaatggttctgaagggggaaccgcaggtcccagtgactcatggtgaccacacgcctgcatccgaggatgacttcagccccctgtcctctccccacagtgagctgctccccacaggccccctctattgcgaatgccctgagtcaagctgcccagtcttcatccagttatgctgaaaaccccactcttggttctctgccttgatatcaccacgtttccaaagaaagtgtgcaaaactcctgggctttggagtccagcacactccagggtccagggtccagggtccagggtcaacatccaactcagttgctttctggttataggctcaggcaggcacatttgtcaaagaggtgttttaatcaatacattgaagataatgataattccttccatgcagcactggtattagtaatagctgagatattatatataaaatacttgacaaaattcttaccagaaaaggctggttggctgttacgatcaaggggactttaatgggatggggagaagaccccgctcccagtcctgtcatctgtgaatttgttattaataagtatttattgacagtgcatctgcacgcactcctgtctctcagagctgtggaggggaagagctccctgcagggtgaggcagggtgcggggtgagaagtgctgggttaggacaggggctgcacctgccaggcctggccctgtgtgcatggaaggggtgggagagcccccagagtggggaaggctcataggctgccccctagagcagagaacagcaaggtcaggtgtccacacgtaggatgctccctccagcagcctgcagaaggggctgcggaccccagggtgggggtgactggggttggcaggaggaccggggtagggaatacggttctgctgtgcaacacgcctctgcagcagtggcagccaagacccaccttcatagatggtgtctgttcagtaaatgtttgatgaaagcaaagacaggaacagaggaggggagggaaggaagggtgggacaaagagccacactaattacacaggaaggaaaagctgcatcctcagaaactgcagccaaactcacactcacagcccacaggtggggggctcccaagaaatggtacagacgaaagacaaaaacaactccgaactcaaactcacacctcacgggtggagcagggttcctaagaaatagcacagacaaagatggagaagactccacattcaaactcacagcacagcccacaggtggggcggggttcctaagaaacagcacagatgaaacagaaagactccaagaaggccaaagtcagtagacccacaagaggttcatgggggttcaggtggatggggaccccctagctgtattagtcctttttcatgctgctaataaagacatacctgagactgggtaatttatgcaggaaagaggtttaatggactcacaattccacatggctgggggggcctcacaatcatggtggaaggcaaagaggagcaaagtcacatctcacatggatgacagcaggcaaagagagcttgtatggggaaactcccccttataaaaccatcagatcttgtgaggtttagtcactatcaggagaacagcaagggaaagacccacccctatgattcgattaccttccaacgggtccctcccacaacatatgggaattatgggagctgcaattcaagatcagatttcagtggggacacagccaaaccatatcattatgcccctggcctctcccaaatctcacgtcctcacattttaaaaccaatcatatcttcccaacagccccccaaagtcttaactcatttcagcattaactcaaaagcccacagtccaatgtctcatctgagacaaggcaagtcccttccacctatgagcctgtaaaatcaaaaacaagttacttgtttcctagacataatggaggcataggtatttgttaaatacagccattccaaatgggagaacttggccaaaacaaagaggctacaggccccacgcaagtctgaaatctagcagggcagtcaaatcttaaagctccaaaatgatctcctttgactccatgtcaaacatctgggtcatggtgatgcaagaggtgggttctcatggtcttgggcaactctgcccctgtggctttgcagagtaaagcctccctcccagctgccttcacgggctggcattgagtgtctgagacttttccaggcacacagtgccagttgttggtagatctaccattttggggtctggaggaccgtggccctcttctcacagctccactagacagtgccccagtagggactctgtgtgcaggttccaactccacatttcccttctgcactgccctagcagaggttctccatgagggccccacccctggagccaacttctgcctgggcatccaggcatttccatacatcttctgaaatctatgcagaggttcccaaaccccagtacttgacttctgtgcacctgcaggctcaacactatgtggaagctgccaaggcttggggcttgcccccctctgaagccacagcctgagctccacattgactcatttcagccacaactggagcagctgggacgcagggcatcaagtccctaggctgcacacagcatggggaccctgggcccaacccacaaaaccactttttcctcctgggcctcagggcctgtgatgggaggggctgctgtgaagacctctgacatgccctggagacattttccctattgtctcagggattcacatttggctccttgttacttaggcaaatttccacagctggcttgaatttctagtcagaaattgggattttattttctatcacactgtcaggctgcaaattttctgaacttttatgctctgcttcccctacaaaaccaagcacccaagtcaccttttgaatgctttgctgcttagaaatttcttccgccacataccctaaatcatcttgctcaagttcaaagttccacaaatgtctaggacaggggcaaaatgctgccagtctatttgctaaaacataacaagagtcacttttgctctggttcccaacaagttcctcatttccatctgagaccacctcagcctggactttattgtccatattgctgtcagcattttaggcaaagccattcaacaagcctctaggaagtgccaaactttcccacattttcctgtcttctgctgagccctccaaactgttccaacccctgcctgttacccaggtccaaagttgcttccacatttttggttatctacagcagtgccccactctaccggtaccaatttactgtattagtctgttttcatgctgttgataaagacatacccgagactgggtaatttatacaggaaagtgatttaattgactcacagttccacatggctggggaggcctcacaatcatggtgaaagaccaagggatgtcttacatggcagcaggtaagagagagtttgtgcagagaaactcccccttatagaaccatcagatcttgtaagacttattcactaccatgagaacagcacgagaaagacccactcccatgattcaagtgcctcccactgggtctctcccacaatacatgggaattgtgggagctacaatttaagatgggatttgggtacagacacagccaaaccatatcactagccctaaggcaggtgccagttacattgtctcaccagagcaccctgagagccacagccaggagagaaatggtgggcaggacccactacaggtccaccctggtgggcatacatgtgcaggcacctgggcaacgcagctcagcacagcctcatgactccaactcccctccgtgaacagccccgggggtcaggatgtggaggaggccaggaccagggaggatggggccactgcatcaccaccctgggctgaagacccctccaccatgtcctgggtaagccacacaacctcacccactttttggtgtaaaacaggtaaaacagcatggaatttgcaaagtatcccatgaatgcgactgttctcctccccactcccctcttctctcctcagaaagtcgccatgaaggaaagaaatgcataaatctgtcttctgcaaaaacaatttttccagccccattctattcttacagcaggagtccccaacccccgggccatgaaccagtacaagaaccaggccacacagcaggaggtgagcagcaggtgtgcgagcattcccgcctgagttctgctgcctgtcagatcagcggtggtgttagattttacaggagtgcaaaccccattgtgaactgcgcacaggagggacagaagctgcacactctgtacgagaatctaatgcctcatgatccaaggtggagctgaggcagtgatgggagtgctggggagcagctgcaaacacagattaacatgaacagagaggtctgactgcacagagatcacaatcaatcaattgcttgcagacacatatgaaaaccctatcagtgggctttagagtggcaaatgagttggaaaaaagtgcacaataaacatattgcacttggatctttccaaaaccacacccccaaccatggtccatggaaaaactgtcttccaggaagctggtccctggtgccaaaaaggttggggaccactgtcttacagcctattgataaatggcacactccgtcagtatcccacagtacattaatgttcatcatgacatgatgcctggagaacattaaggctcctattaacacatgaggggccctgaagacccacctcctgagctaacgtccaacaagagttcaaaagacacacctcatgcagaactcttattcaacagaatttgaagaactattttgaagaattatttttgtaactcattcaaaaaaagtgatcagaggcaaaagcagcatgcagggtcaggcacttctattagtgaatgtatctatttgatataatccacagggccagtatttgcttcagaacagagcaatcatgcacataatatcatccctataaacaaaatgggaaatagcatggacttaacattccaaagtataatatactcttccaaaggagagattgccctcaccctttgtggctgccagtttaaagtgcagagttttgccatggaatgccctttcaattttttattaattacatggaaccaaagactttaaatagcctccgggatcccaaaaaatgatattttaaaattatccagctttactgtcagaaatttaatttgaagttcaaaagtcaagataaaactaaagtcatcaaaacagaaggacaaaagaactttaagtggtcaggaaagaaaggtgtgggtttgtgttcaattgcagaagagtctcagggtgagagtttatggaaaccccaactagagcccacctgctcaggtgtcttcacgcacacatatgtctcagagaggcacacagtagcagcaaacaactacggccagtttgtgatgttaatgacttttttacagaattacgtaataacgtcattagtattttaaaccctttggcatatgagagccactatgctccggaaagcgtgatcacactgaaggaatccttttcacttgagtccttggcttgaaaatgccactgtttggatggttacttcctgttgagaaccttgaccattttcagggacagaactttaaactctgcttgaagcatcccgcgcatcctctgtctcatcgctggtcatccatgtccctcacacactcatgatttgcgtgcaccaactgtatcacaacctgctgggctcgctcaaggtacttggcacacatgtctatttgtctgctgtcacccaggtggccacatttggaggtcaccacacaggaggaggagctggtaagggcctgcattgcccattaattttgaggatttatggtaccctggaaaccaaaaggacctttcggccagacaccaacacatctctcaggagcacaacacagggcagaagcagccgggatgtggggaccgcgggctgtaaactattaatgcaagatgccaggggcagcacccaacctccagaggtttttcccgctgatctcagtgaaaggtaggcactgacagtatccacagtgtgagagggcaggggctccttaacagttacagatctctgtatgcaaatgaaagtacacaaagccagacacttaggaagaaggcgcttcaacaggcacaggtgttactgcttaagccaagacagatgagtataatgtagagaaaccctgtattacaggagggattaagccagaagggtgtttgtgggagggaatgaaccttcccttcatcaaaaatcactgcaaactgtgtgcataacacccatctgtgtgtttaaaataaaaaatttcatttactaataagtgattacatttgacccttaaacatgcactctttgtaaaagttaccaaaggtaccaaaactgaaatactaattgccagaagacattttcacgagtcagagggccgaccaaacacagatgtcagggtgcacctctgcagcatgtgggctatgcgcatcagtaaaatcacctgcccgccctcacagcagtatttgctgcgcatcagtaaaatcacctgcccgcccccacagcaggatttgctggtgtgacttccgccctcaccgcagaagaatttgctggtgtgacttccattcagtgcatcaacgtcccctaatggagtttctgatgtttaaattttccgttccacactcccaccaatgcccctgaagcatggaataataaatacgaaaccatttgtcctcttctgataacatcgacaagaacctaaatgtcttctttgtaaaccaatcataccacactatgtgagtcccactgtaacaaaagctactttaatataaaattctgggaacaattccagagacaagagtcccaaccaattaaggcaagaaagacaccactggaaaaaaaaaggtttcaattgaaccgatgaagatgtactctgatgacatttcagattttgaaaggatttgaagaaacattaagggtgaaagtgcaacaaccaagtagaattggcctctactttaaaatctcactgtatagcaagcaaagagagctgttttgagataaaatggaaaatcagaagtttgggcatccatgaaacattcttgttaattaaaatccagcataaaattccacaccttgtttcatttcagtgatttaaacaattacattaatgataataatgccttaagtcaacaaaggaggtccatacaatttttcccttttaatggggtttagatattactcaaagtttacaaatgctggcatacagaaaagcacaagttcaggcctgctactgatgagctacgtgataccagaaaacggtttcaagtccgtttctaaatttccacagtctccaggaagaagatgggttggtgaccttgtgcgtctctcctgtggtgaacaccatggatttcatctccaggaagagggctctgctgtgtttccctccatgagcagatgtgcccctcctcccatgccccgagtccctccttccgtgctcctcctccctcctcccattccccgagtccctcctcctgtgctctgagtccctatttctgtgcccctcctccctcctcccatgccctgagtccctcctcccgtgccccaagtccctcctcccgtgccccgagtccctcctcccgtgccgagtccctccttctgtacccttcctccctcctcccgtgccccaagtccctcctcccatgcccagagtccctcctcccatgccccaagtccctcctcccatgccctgagtccctcctcctgtgccccaagtccctcctcccgtgccccgagtccctcctcctgtgctctgagtccctatttctgtgcccctcctccctcctcccatgccctgagtccctcctcccgtgccccaagtccctcctcccgtgccccgagtccctcctcccgtgccgagtccctccttctgtacccctcctccctcctcccgtgccccaagtccctcctcccgtgccccaagtccctcctcccatgcccagagtccctcctcccatgccccgagtccctcctcccatggtgcaggagctgcctccgttcatccaggctcattcatccaattcccctcgggaccagggtatgcacttttccaggtagcttgatggggtcaggggagcttatagctatggatgggtgcaggagatggggccagtggggacatgaacctggagaaagcataactgaacacactgtcgatcatccaaatgcccaaacatttaacctggaaaaaaatggatccttcaatccccaatcttatccaccatcaccaaatgtagatgtacaacctaccagcgatcaagttcaggcaacaaaaaacagaaagcccagcccttcacaggctcctactgcatcgactcccagctcttgctgtggtggtttcaagtgttaatgcagctctccagagttttagcaaatctgctaccctaggagatgaatgggaaggtgttagcaatctgccaccctgggagatgaatgggaaggtgcttccacatcctccatgatgaacacgactccacacggcccgatcacccacctaagcactcgccacaggggtgggctgaggatggggggactgtggcttctcaccctctgggatcgcgtctgcccaggctcttttgatgacgcgtctctgtggcagcatgtgttctagaacacgggaggctctgcccaaatgcctctgaggccaaaccgggacccagatccccaggaggctgggaaagtcctgccctaagtggcctcagcttcaaccagcggctgccctggcttcagggcccacacggacagatctcctggtaccacatgggagaccagaaacctttccatgaaactttcagaactgtaaacacagatgcccaattcacatagacactgaaatcacatctgcaagccaaataggtcagggagggctcatcctgcaccacaggagggctgaggtggggccaggaccacgctcactgccttcgctggggtctccgcaggctccagagagctggaaggcagatggtgaccacaaagacaactcttgttttgtaagacggtagccaagggcgcatttacaagtggagtgcgatcgggttacgatgttggaaagcactctctgggtcctggggggactggactccagggggctgcggcatccctgtcagctcagcttggcccggccaggcccggggatgcagctgaaggcggagagctgctgtgaggccctgggaagacgcggtggccaccaccatctgctgaatctgctgacttaaaggcaatggtgctggatggtctcatccaggcggaggctgcagagccagggcgaagtttcctgaaggagatggaatcctgctgtagatggcggcaacatgaagagctgtcaaagtctccaagccgctgccctgtgggattcggacaagaggctgcagcaggaacccgcctctgaattcccagcccaccagctgccctgcagatgtcagacccgccaggcccccaatcggtgagctaatgccttgaaatactgtctctgtctgtacacacacatatatctctatttacacacacatatatctatttatacacacacatctctatttatacacacatacaaaccccctgctgagtctgtttctctggagaaccccagctccacagcagccttctccccacagaaaatactttcggaggattcccccgaccccaggatgtagccacctctcccctgtgtcggcttcactctgcaggtctcggcaaggagcacccctgtccacactgaacaagaagcccctggacccttccgagtggccatcacctgatccacggccacatcctccacgggaagccacggttcacgtcaatcccggcaccaaggtcccagaattcacagcttctgggctcggtcccgcaagaccacccccccatgagggccagtgcagatggacagccaggccacctgcatttcttcccagccagcgacaaactcggctgcccacaacctcctcgggtgcaatttttctttggatgacacagaacttgggaaagcacttcactcaccatcactagctcttataaaggacacagctcaaggagagccaaactgagggacgcacggggcagggtgcagggcacacgtcacacctgccctgggtgcaccaggctccctgcacctccacgtgtctgccaacctgcgagctccatgaacctctcacttagttctctatgcaggtttcacgtacataggcatgatggattaaatcactggccattggtgattaaccccccaagagttgggggggcctgaaaggcccaaccatctaatggtgccttggcctttctggccaccagccccaccctgaagccagccagggctcccagccacctctcagcacacaaaagacactcatcgccccagagactccaagggtctcaggagccaggaaccagacacaaactccaaatacatacgttattattaacccacacacagatgatacaaaacttctttttcaccctccaatgctcagtgctgagctcagctgtgatcgatctgaaggaataggtcaaccctaagggctaagctcggactggcgattagaacctacaaccatggaggcttgatttcacccaacgtgaggcgggcccctggaaggagaagggctccagatgcaggcagggcagtgcctgggcctcaaagtctgcgaagagaagctgaagggaaacaggcgtccgaagggccacacctgggccctgaagccctcggcaggaggcaggtgcggccactgaggccacaccacacttcagtgagtgattcctcacagaatgaaacacgacacacctgctgtacataaagttgtttttaagatcagcccaggctgcgacgcatgtggaggacacgcagccgtgtccatagaccacacgaagtgaaagcgcactttgactgtgaaatccaattactttggatttaagctctgaaatgcaagttcattagaaaagagatgtattgtgccttctttctgtggtggcccctcaattaatcctctggtcattgaagaatgaaaaacatcaacccacaggcttcccttgcacagacaccagagtctgagtgaataattatggttttgattctgagttatgaaacaaacactcctccttattaaataaattaaaaataatgggatctgcgaaagatcaatacacaagaaaggtacatttgcaataacggctgccgccgtcacaaatgcaattctagactcagccaccagcctggctgctggaaccaggccctgcgagaacacggatgacaacacagatgcacggataaatcatcacgcgtcgcattcccagaatagaaaatgggctaaacgcaagttctgtccttcctgctctcctttgttcctggccacatcttagttttcacaaacgggctcttggagaaaagaggtgagagcctcagcaaaggttgtgggatgttaatggacacatccagaaagcagggccctggcccaagacgcgtggtgaggcagccccaggtgctgtcctccggtgcagccaggcctcctgcatccacctcggatgactctgtaatgacgctgttcacatccacagaagacaggaggatcctacggagggatgaagcctctcaaacgtctacacgatactcagctgcgtttattcaaaccgatcttctttgtgccccagctccatccccgccccaccaccctgtcctctcatcccccggctgctgagtgtgcacagaggcatgtccccttgaactcagaggcgccgtcgccctgggccgtgtcctcccacggctctcatggtcacacagctcagtggctgctatgtggaaatggcctctccttgcagccaggggcagccggcacctggaacagcaatgaactcgactaagaagttattcccatgcagcgagtggcactaagtcgcagccgaaccaatttgcttcatgggaaacacatttgccttcaaagaacacgtaaagtggaatcagcagccagacggagttatgaggtgagacctgcggagtctctgagctggaggcccttctgccccaggacagtcacagcaggcaccccgaccccatcccttctccagcctcgcagtaggaccatcgtgctggagggcctcggccaaggtaggagggaacacaggcatctggacaccgagtggccgcaatgctgctcactgtggctctgggagctgagcctgtcccatgccaactgctgtccactgcccggccaggcttgccccgtcccagagggtgcagaaccaccagcccctcagctctcagcgcactttgcgggagagctggccgatgtctcccaagccttctcttctcgcgcatcgtccccttaactgtcagctccactctacaaatgtcctctcaaaatgcgaagctcaaggtgggtatgtcatgccccaaagaggctacgaaaaatggaggggcaggaagggcagatgaaaacccatcccccacgggtgccgcgtcacatgcactgtgtccacgtggcaggctctgtccgctgtcagggccctacaggaacaagccctcctgaaatggtgtgaaacccacccccacctccactaattcaccacttccaaattcgaggggtggaaatcatcctaactacagactagattttcttccctcttgcgacggttgtaacgcaacagccatgtttcacgttcagatgtacagctgcaggaacaaatacttcttattccaaacaccctaacccagcagctgctgctcccttaaagataaaaagaacctgcacgagagacattgacttccattccctggagggaccctctggggccaatggccgaggagaaaggggctgtgagcccacgccatccctccaagcctggaagcccaggcgccaccctcccttgtctgaaaccgcgctccctctcctggccaagctgcaccaggcccgaaatccaggtccgggccctgacacccagctatactcacaggcccatctctccttcggacgctgactgcagaggcccgtcgggaaagagaccatgtcctgggaaggtctctcagccacagcagcctcccctagcttcttcctgaggcttaaggtcaccatgaggaggatacaaatgtctcattttatgatgagaaatgcccacctaccccgcaggaggagaggccttcccacattttcccaccagcacccatgctgcacatgccccttgagatgcaggcccaacccctgccaggacatagagcagctggagtcccaccccagcccctcacagccctgaccagctgcccaggctggatgcagccctgcagccctggggatgggaggaggcaggaggtttccccagtgccaggccctggtcagtaccgggggcgggggaggaaaggagctgcacccccagccagacaaggccacaaacagggcacaacagtgagcagcactgctctcaccagaatttaaaagcaaacagatttgccacctgggatgacgccctcaggaatgagcacctttgagacagggagcccgcctgtgagtcgagagtcctccaccaggcccccagggtggcttcaggagggaccgtttgcagggcagggatgatgcagtactgggctggtgcggggggagtagccatacccaggggagggaattgtgaggactgggctgcctttgggggtgacctttggccaagggacaatggccaggctggggcttccgtggggagggaatgagggtggacctcccctctccctcccttcatctcctgtccatcctcagggtgaggactctgatgtggccatgcaggtcaaactccccgaggaggagaggggctgggtcagggaccaccccagcactggacacagggtgtggacacaaaggcaagcctcctgggcactgtggatgttccacaagatgggtccactcatgagaccgtggctgagcggcaggcacagggcaaccccaagtgttctgtccatgcgtcagctcacacgaggagagggcggcggggatctgctgcacacccagcgttgtctggggaaccatcctggcatggagcagggcctcacaggacagctgcttctcttggccagcaagagctccacgtgggggcacggccccagcagccagtgaggatggcagaacatgtgggtgcagccctgtccttgtgtccgtgggggaggagtcaactcaccggggtctgaccacatcaaggtgctacagaaacacattgtagatcaatgtgtttcaccaactgcgaagacacaaagccgggccctgggtccagtcagcagccaaggggcagggtccttggaagccaagccggagcctcgccaggaccccacaggcttcccggtatcccctgcggacaggaccatcctgctctggttatctgtccacatcccaaagcctcatcggacctgcaggtatgtctcaccccaggcagcccctctcggtagaattttagaaataacttccttccattaaggaagaacagggtgatgagaactcctcgagcacgcctgtcaacctcagtgtctagaaccaccagcccctccagggaggctgaaaacagcaagtccacagagagaaagggctgcacaggcccagctgcccaggcccctgtgcctgctgcagagaaggaaggggagtcctttccaggggcctctgcaccccaggtggccctggtcttactcgatgttggctggaaaggagactgggcaggaagaaaacgggagctggaaaccatcccatcctggtcacagcgcctccaacgcaccctcctcaccccacggcgtctttaaaaaggccgaaacctgggtttgaaaatcctgcaaacatccaagagactcaaatgctgcgtgataaatttagaaaggtcaagtgtacttaacacgctctgccacgaacactgaaggaaaattaaagttcagcctggtttccttaaacatcatcaccagggggcacgtcggagggacttcgctctgggagacgccttgcaggacgaccccgggcaacttcagcctccacacaaatgacacagaaatggttcccagaacaaaaaaggacactctgagcctgacaggggatggaggtgtttccctcagacaacataaaggtctcaggcccggcacctgctgcagaccggcctcagctctgggtttctccctttggtgaatctgcaccttttggaagtggaagtcatctttcagcgtcattttcatcagagtttctagcttttcacagcttagtgggggatgcttcccaatagtgtgatggctctaatgcttttcattataatctcatcgcctaacactggtgaagaaggaatcatgacgtgattgcaacacacttcaaggaagcccacaccgtcttcatgatggaacatcactcaggggcttctcaaacgtggtgagcagcctgggttcaatgtatatcaccttccatcacctccctccccagccaaggccacgtcccctaacacacaatcaaacccaaaccccaaggacaccactgctctgggacccccacccttcatctctcaccccttaaactgtgccatcagcccatccactggcatcctgggtaacaatgtcccacccccatggacacctcgctccccctctgtccctcacagatgcgtggcccccctctgtaccccacagatgcctggacccttctctcccacagacacctggaccccctctgtcccccacggacacctcaacccctctgtccccgacggacacctggaccccctctgtcccccacggatgcgtggttcccctatgtcccccacagatgcctggacctctctgttccctgtggaccactggccccactctgtcccccatagacgcctggctcccctctggctcccccaccaaggagcaggtataatttttcttggcacaaaaatccatggctgctttcagggccacagggagggcattggaggccacggaagtgtgagaggcacaggtgtgtgcagggaacacctgtggaactgctgtcccagcctgcgacggggatgctgctgcctcaccaggagtgacccaggttggcaggtcggggatgagcccccgtggctgtccaagcccacctggtgagaatggagcagccctggttccctgagcacccccttcagagctccgggtggtctctaagtactggctgctcgtccatccccccaggcgcagaaagtgtcaaggcacaaaactcactcattgatgaggggagcagatttttgctgctgggggcctaagaaaggaagacgagctagcgtcaaagcttccagcattcaggacggggcgacaaggactgtaggcaactcacaaaaacacagagggtgtgcggcaggggctgcccctccacctgactcagtgttggagacccgacaccctcacctcctaaacagccctgaccagaggcatttaccgtgtgcccaaaagagaccgaatcgtcacagggacagtgggacagcggccaggctgtgcaggccgcatctctgcaacgcgtcagccagagaaagccgggggcaccccagccagcactcaggaggccctgcccgtccacacgacacctgggccaaccagccctttctgctgtaaaacttcggctcctctacctgcctgagtctttgccaagcacgagggacagtgactgacccctcgttcccgccagcctgagtaagtagccgcgttttcgcctgggtggtctgcaaggttcacccaccttccaggagcctccggagtctggggtggaggggctgcagtacccgagcacggccgctagatggcacgcaggcgcggtctcgacctgaatcccccgtgcgggcacctgcgcccagggctgtccctgcacaagtgaggggtgaggggtgaggggcgaggggtgaggggcgaggggcgaggggcgaggcgcgaggggccaggggccaggggcgaggggcgagggggaggcgcgaggggcgaggggccaggggcgaggcgcgaggggtgaggggtgaggggcgaggggtgaggcgcgaggggccaggggcgaggggcgaggggcgaggggccaggggcgaggggtgcggggcgaggggcgaggcgcgaggggccaggggtgaggggtgaggggtgaggcgcgaggggccaggggcgaggggcgaggcgcgaggggccaggggtgaggggtgaggggtgaggcgcgaggggccaggggcgaggggccaggggcgaggcgcgaggggagaggggcgaggggcgaggcgcgaggggcgaggcgcgaggggcgaggggcgaggggcgaggggcgaggcgcgaggggagaggggagaggggcgaggggtgaggcgcgaggggcgaggggtgaggcgcgaggggcgaggggtgaggcgcgaggggcgaggggcgagggctcccggcctgcgccgccttggatcccaccagccccgaattcgggcagagcgccatggagggcccagcctggagggggagctcggagcctgcagcaggtgaggtcgggctacagacttccctctgccccctggtcacagaggtgagagtggggcctcatcccagtcccgccgcgacccatggggcagagctgctgccctggcccaggcacgcacagcttctcaacagccacatcgcaggctggccctggcctccccaaccagagaccaagctcccaggctgcagaggcagcgaaggccgggacacgcacagggcagcgggcagccagtgccacgtgggctgaggaggcactccctaacgggagacagcgcccagccagggctggttttctcaccgtcattgtcaaaggccttttgagcattttcacacacacacacaaagaagccgtttaaaacaataaaagtgtagtgctggggaaatgattaatgcatatatctctatttcaaacccgcaaaaggaatcaaaacaaaaagacctttaaagagacacacaaaaaggtgacagcatcgtgaggtgaagtctgtgtgtgtgtgtacatgtgcacgtgtgtgtgcatgaatgtgtcacgtgtgtgcacgcgtgtacatgcatgtgattttgttcacatgcatgcacatgtggagggagcgagctgctcccctcctcgccgagtgagttttgtgccttgcccgcttcctgtgctcagggggatggacaagcagccaggatgttagaggccacccagagctctgaagggggcactcagggaactggggcagctccgttctcacagggtaggcttgtgtgtgctttgtgtgcacgtgtgtgtgcatgtttgtgtgtgcacatgtgtgcatgtgtgtgtgtgcgcataccatctccccaagccgcctccacctgcacacaccagcggtgacccgcctcggggtctgtcctgttttgccacaacagctgtagagaatgccaagcagctcagcagtggttcccaaaataagactgttgagagcccagaaatagcccccagagaacactgtaaaagccccaagacaaggaaaaagtacacgagcttgtgacatgatggtacaatggcctcaaggaaattgcagctttggaaagaaactttattttctgtcttttgaaacaaaccgacatcctgtcctctgtggagacccaggccccgctgaagtgctctttcaatttgctcttttaatttgctcttttaattattctgaaaggccatctgctgtaagagtgcctccctgatttaaactatgcctcacaccctcaaaacttacacttcagcattttttccttccttgcgtaatctcaaagcaaacaagattcagagaggctcacttcctgggtaatgcaggagatgccctccgaggtagggacaggggcttgtgcccaatgtggggccactctgcagagaaccacatgagctgcgcccatccaggatgctgccaggagcctgcatccagacaccctcagcggttgtgaaccagccctcccagcggcaggacccccgagcagttgtgaaccagcctcagggttgccctccaagtggccaggggacagggctgacatgaagcaggtcctcagatcgagaccagctctggaggcccaaacaaacactcctcctgtgccctgcaccctcaccttcccttccagagaaatagtgtgtcctgccccagctcaaaatagggacagcacagggctccacccaggaaagctgggggccgaaatgtcataccatttgggcaggtctgggcctgtcctgccactccctccccaccccccagtcactctgtgcctccacttccacatgacaacaacatccctctcagggctgagtctcctcccctgcagagaagatgccttgtgaggcctcttgaccaaaagaaacaggaaacaaatacagaataaaagtataacagtgaataaaaacagctacatgcacacacaactgtgcaaagcaaaacaaaacaaattgaaaagcacaagcagggtgccacggcctgacagtaacaatcaaacaggagggttttccaatgccatgaacgtaaatcgaggtgtgcatgataacaaggagtaggaaccggagggacggccactgagggtggaaccaaagcagggaaatgagaggatgatgagtccccactgatcctgaggctgggaaaatttgcagactcgaagattctgtagtgctgatacatccacacattccatggtcctgagggacactgtctagcttacaaatccatctgtaactgttcaaccagactagcaacccgtcattcatcattcataggagaatgcaaaattacatcatgcacaaagtgctcccccatgtatcaactgcatttgaacagatttgtgttttcaaaaccagggtggtagcaagattgagtatgcccagtaaatgctagatattattatcccactagacactgaaaacggtcccctttcctgggttgtgttgctggccttgccacaggcaatgccgagggcagctgcctcatcctcccccacactgttgcctcacctggtcacaggtgggaagccaggtggggctcggtgagtgtcttctaactgtttctgcattgctagaatggggtaaacaaagaacaaagaaaacatacataaagtacattctttgttctgttattgccgttgtcaaagttaactctctcttcttattttagggtttatttttaaacatcatgcttgcacatagtttgaaaaatctaagtctggttggggaaatgagcaaacctctaacccaccttttccccacccgcatttctactccccagaggtaagcaccctcaactcatttagctgactcttggttttcatctccatatctccacatgacacattcacgttgccatttctcagctttcagatttaggatgtatctattttctgactgctacagaagatgggcctacctctccataacacatcactgtttccaagcttactttctctttcccagtttagttacattacaattttcatcagatcagtattatgtgcttacaatattgtgactttgtaaatgctatccccaactaggctatgtagtacgctgtgactagtattaattttttttctttttgttttccctggagttataaatgtcttatgtatttgcttagtgtccacagtgtctcttcctttcacagtgtcttcttgtttttcctggagttatacatgtcttatgtatttgcttagtgtccatagtctctcttcatttcatgctgtcttcttccatgtggctgtcagggctctttcattagaggctttccataagtgtccagtgatcctgggatgcctgctcatatttaataaggggcacaaagagctgatttagaattgtgtcacctggtgaattgttgaaagtgggtgtcagtataggagaccctgctgagcagtttcactgggaaaaattttctctatttctattcccacagaagcagacctggaataagaaacaattgtagttggccaggtgtggtagtgcacacctgtgatctcagtgttttgggaggccaaggcaggagaatcacttgagtccaagagtttgagaacagcctgggccacaaagtgagatctctgtctctataaaatcatttttaaaaattagccaggcatggtagctcctgcctgtggtctcagctacttaggaggctgaggcaggaggattacttcagcccaggaggtcaaggctgcagtgagctatgatcaagccactgcactgcagcctgggtgataaagcaagatcctgtctcaagaaaagaaagaaaagaaaagaaggaaaagaaacaagggaatggaaggggaggggagaggaggaaatttttaaaagaaaaaaagtgtgacaaggaaggttgggtttccagtgaaaggtgcatcaccagccagctcctactgcaccggaaccatcccattcaaggggtggtgtagctgaggtatttaaacgctcactccttggccgtcagttggagctctcccagcaaggggagtgggaagcgggactcattagtccccaggcacttgcagtcccacagggagcgaagctgggaggggcggcgagtctgcagaccagcaccagtctgggtttgccaaactccctgcatgcaagagatctgctgtgaccacacctgcagggtactcaggccacctttcatactggggtgaggagaggaagtaaacgcttttctcatgtaacagatgcctttatgtcatcgttaaagctgtgctttctgacagtctttagaggttttaatgaggatgcctaaacttacgaggcccccacaaacatcaagaattttgccaaaagaaatgacgtaactgatggatattttttgaagaccaatgtcttagtcacttttgaaccaagcagatgcgctaccctatgtggacagggcagtcgtcatgcacagaacccatgctgtcccatctcccccacactcaggctggagcagcattctggctttgtttttgttttgctttattgctctgtgtctaccagacacacagctcctcagaaactggacagaaagcctcctgacatcaccacaacaaaatcacagccattaagtccaacgggattgctttatggtggctcaagcccatttctctgagctccaaagccatcctgacatcattatgctgcatcattatgaagccaacacacatctaacaagaacacaagatgcgctttgtcatctcagctacgattctccttggggtgaaagtgaggggcgctgggagttgccctcttgcaggtcccaaggcagcatctccccagcaactgagaccagcctcagcacaggacaccgtggtcccagccacaaatgcagacagagcctctcaggccaacctcagagcctctctggagtgcaggcatcctctacacaaacggaggcagccctgctccatgcctgccatgcagctgagacggatcctcaggacacgtcctgcctgcaggtgagctcctcaaacaccaaccagcagcccccgtcccaccccccgcattcccccagatcctgtaaagaacatcctgtaaagaacctcacgaggaaagccgagcagacagcaaacccagagcttccccgactgcggtgggccctgctccgcctcctgtggccaaggccgctcatcacccaggaaccgacacgcacgagatgcagaatctaaaagagaaagcggcaccgccaccagcaagcacaagagggacgtggggcctgatgacggaggcagcagtgatgcctgcggtgccaggggctctccgggttcctgaccctctgacagttcacctggaaggcgggctccaagcccctcagacccaggctcatcccgtgagcaaggaaggctgtgtgtatggaggctccatcccctcgtttgttatttttactgggcttcttcctctttttccagcagtgaaaaatcttcagagacctccaccagggagaaaatagaccggaagctccttctctgtgttgctgccacccaggagccgctggaccccaagggagcagcatggaggcagagagacctggcccagcacagaagcgaagctgccacgggacggccccacgggtgccaagacacgatggaccccaagggagcagcgtggaggcagagagaccctggcctagtgcaggagtggggctgccatgggacagccccatggttgccatgacacactgggtcccaggcattctagtgaagagctgttaccataagaggaactcaaaaagggaaatgctagtttaataactaaattcttaggaagaaatgtctttagtaaaatatcttgatgatctgataatgcacaaaattattcccgagacaaaatttgaaggggctgaaaggaaaacaaaaggacgaatggctggtaattcctaagggagaagctgggaagacagaggggctcaggggactgacggcagcctggaaaccagcaggtgcccagtggagggaagacaaaacgagagcaggggtgcctgaatccatagagatgtccacactgccgcccagacctcccaggcctctctccatccagaccgccagtcaagttcccatctgggaaagggggtctggccggtgcccagagccagggagaggtgggaaacggggtgtgaaagagagatgaggaaagggggtctgaccggtgcccagcagggtcagggagaggcgggacacggggtgtgaaagagaggagatgaggagtcagcacatccagccaccccctccaaacacacctgggaaaagggagaaccccggaggacagcccggtgggagagtggctcacaacaagtccacatacatcttgtgggactcagggaccagccagacacaggaccagggtatacaggtgctgacttttgagctgtccacggcactaggaggcacatgccccagcacctccccaaattggaaatctgggggtacaacctctgtacacacatgcattccagctcgcaaatgagcacctgcctcagagcttcaccttgactctcggaggtggggctggctcatgctgttggccagtgcaccccacgccctcttctctgctaattttgcatctgcactgaatttacgttggtgggagtcagcgccctccaactccatggagacaagactctgctgtgcacactgctgagactccaatatcccacgtgccaggggcttactccatatttggcagataaattaaagccccaaaatgcagagtcatcgatgagtctccttccaatgcagctgtccatgcggccttgggcaagccctgcgatgttcctgcagggaagggaaggtctgggtgtctgcagctgtcgtgcctgctctccggaccctgcgcccgccctagagggatccaagggccatggccaggcagggtggtgtcatggacagctctggtcccacggtggagggacagggtggtgggggctcaacccaggccagggactgtctgtcccttcctggctttgcccagcagaaagcaaaactctgatgagggagaatcatggggtgcaggggcagcaggtcagaaaagaaaagcctcctctgtgattctccacagcaaagggacccttcccagagctggcactgaaaacccatgagcagccccatcccttacaaccaaacacagctccgtttgcctcccacggcttcttcatatgcttcccagggggttcattctcgctctgtttggagacaccacagggttttggtgaaaatccccccacattaaggtctggaccaccttcaagctgtgcacttgggaggttgagcagacagaatgcacgtgggcacgtggccagagagaaacctgccccatcaggccaggggagcacatgtgagcacctctgccagcagacccctcaccagcaggaagccaagtgaaagacacaaacgcacccatgcaggccctgccgtactgatgtgaaaacgtaaataaccagagctgacctgaagagcatgtctccaccaggctgcaggcaggagtggcaaggattccaccctgacatgcaggccccaccccagcaaccctggacaggcccgggcacaggcccagctgccctcgttctgcaacagctcccaggtaatcctcatgggctccaggtttgagaatcgtgcccggagcaagcacatttaggcccaaacccctgggtgtggcctttgttactccaagggccactctggtggcacgtcaatcaccacagagaggtcacttctgttcacgctgcctgtcggactggaagtgggctaaggtgggcagcaggcaggcagtgcggcagccgggactgcgagtgcctggggtctgaggatcgcacaccaagacccactcggggaggggtcctgcacccccactctgaaaactcccaaaaccccacgaggctgaatcttgattcccccagagttctgaaattctgatgctgggatgatgcactttggaaaaaaccatgatggctggaaagggggaaatgaatatttgctttatgcctttagctagcacaaaaagtcacctaattaaggtaatgaggtttaaaatgtagggtaaaagtcacaagaaacactacaattccatttttataattactcatgtccttaccaaagaaaaggaagtccattaggacagacacaaaaatgacacgaagacgttgtggtgggggaatcccagcatgcgcagtcttttcctggtgatttgcagcctctggactttctataataaaaggtatcgccgtgacaataggagagatcaactttacaaacatcgcttaatcaggacacactgtggccccaaggcttataagtgaccctttcactggacgtcaccagaacacctgtgtgcagggtggggacacgtgctggaggtttgtgctgctgtgtcacacgtgggaagacgtcagacctttcctgagccactagccaggaacacatgcggacagactttgatgggaggatgctgaggagacagagattctgtgtgtgcctttgaaggttctccagttcaggcattaaaacctcctgctgcaggggctgtggaccccttaacctgctgaccccggggcaggcgctgaggccaggctgagccagtccacaggatgaagacaccaggacccgtgaggacgggggctccccaggggacgtggctttgggcaattgctggctgcattccttaaatccctgtttggttatatccaccccaacaacaccagtcactcgggagtcctgtgccagaaacacaagccagggcctgcagtcctcggcctccagctccccagcctcagctccccggcccccagctccttggcctcagctcccgggcctccagctccccggcccccagctctccggcccccagctctccggcttccagctccccggcctcagctccccggcccccagctctccggcctccagctccctggcccccagctccccggcccccagctccccggccccagctccccggcctccagctccccagcccccagctccctggcctccagctcctcggcctcagctccccggccccagctccctggctcccagctccccggccccagctccccagctcccagctccctggcctccagctcctcagcctcagctccccagcctccagctcctcggcctcagctccccggccccagctccccggcccccagctccccggcccccagctccctggcctccagctcctcggcctcagctccccggccccagctccctggccccagcaggagctaagttgttacagggtttccccatccacaaagacagcatcacgaacatccacaccccctaggatgcctggagtccacatcctcccggggtgcctgggagatctctagaattcctgggtgtcacatcccctaggattttggggtcctagcaatgccaacacctagacgaaggtcaggcatggccacagaggccaccctagctataggaaaactctctgaaagcttcgatgttagctccaagcagaggcttggtccaggagggctgaaatcctcccatttaaaacctctgaaaatcttgcctttcacaaacagccccctggaggaaatgtttttttagcatgatgcctgataaggacacaacacagagctgcagcgtccgaccgtctctcctccacactggaagggaacaacaaacaaagcctccgcaagcttgctaagaaacggggcatgcacaacactttactgcagcaagagacgatttatccagttatgtggtatcagatatttttaataactacttttctgaatccaaccaagatccggccctctatactcttaatacagtgaaacttatctgtgtgtggagcctgcacttggaaaactcggaaaaccttcccagaagcaaagtgaaatgctgcataccacgaccacaagtggcttatccatgcatgtggccgcacactgagatcccggtggctcatccgtgagacatgtggccacacactgagatcccgcagtggctcatccgtgagacacgtgtccgcacactgagatcccgcagtggctcatccgtgagacacgtggccgcacactgagatcccgcagtggctcatccgtgagacacgtgtccgcacactgagatcccgcagtggctcatccgtgagacacgtggctgcacactgagatcccggtggctcatccgtgagacacgtggccgcacactgagatcccgcagtggctcatccatgagacacgtggccgcacactgagatcccggtggctcatccgtgagacacgtggccgcacactgagatcccgcagtggctcatccatgagacacgtggccgcacactgagatcccggtggctcatccgtgagacatttggctgcacactgagatcccggtggctcatccgtgagacatttggctgcacactgagatcccggtggctcatccgtgagacatttggctgcacactgagatcccggtggctcatccgtgagacatttggctgcacactgagatcccgcagtggctcatccgtgagacatgtggctgcacactgagatcctgcagtggctcatccgtgagacatgtggctgcacactgagatcccggtggctcatccatgagacatgtggctgcacactgagatcccgcagtggtgcttatctcaggaaggaagagctggtcatgcctggagccccctgcatcatcatcggctccttccccagggcaggtgccgctctggaagcctccccagtctctcccgcggacctgagtcctgctgcagccactcgctggcatgtgacactgaccatgccctgagacctgccctgttcacacacctctagaagactacctctcatccccatgccactggataagtggctgactgcctcctggatacctggctaaacttcaaaaatgctcctgattttgtttttttgtattagatttgtgtttcggctcatttcgttcctctgctgttataaacagaccctggatgacagagctccaggatcacagcaggcactccaggcaaattgctttatctctcaacatggaatcaggaaaatgctgtaaatactggacaaagtctgtcctgcacaggcctcgcccacagcaaacatggagctgccagccctgaacaatgagcaaggctgagcgtgctcaggctgtcagcaaggaaccctccagggagacccagcaagagaaccaacatccgcctgtgaggaggtcgggctgcagacaagcccagccctgggtcctgcgtcctgggtcctgggtcctgcgtcctgcgtcctgggtcctgggtcctgggtcctgcgtcctgcgtcctgggtcctgggtcctgggtcctgggtcctgcgtcctgcgtcctgggtcctgggtcctgggtcctgcgtcctgggtcctgggtcctgggtcctgggtcctgggtcctgggtcctgcgtcctgggtcctgggtcctgggtcctgcgtcctgggtcctgcgtcctgggtcctgggtcctgcgtcctgggtcctgggtcctgggtcctgcgtcctgggtcctgcgtcctgggtcctgggtcctgggtcctgggtcctgggtcctgcgtcctgggtcctgggtcctgcgtcctgcgtcctgggtcctgggtcctgggtcctgcgtcctgggtcctgcgtcctgcgtcctgcgtcctgggtcctgcgtcctgcgtcctgggtcctgtgtcctgggtcctgcgtcctgggtcctgggtcctgcgtcctgcgtcctgggtcctgggtcctgggtcctgcgtcctgggtcctgggtcctgcatcctgcgtcctgcgtcctgggtcctgggtcctgggtcctgcgtcctgcatcctgcgtcctgggtcctggattgagacagaagaccctgggccgctcaagcagagcccggctgcagccccaacctggaatccgtccttgccacgaagccgatgtggaaccatcgccgtgctcagtggagggaccatgagttcatggcgtgattagctgggaggtttggaaacagcaaaagcaaaaaggcatctcccacaatgtccagtgactcaagtctacagagcttgtgtgcaaattcccttaaagtccctcctcatcttcagaagatatccaatgactcaagtctatggagcttgtgtgcaaattcccttaaagtccctcttcatcttcagaagttgaaataggaaaggaaaaggcaacacttagaccaaatgctgaagtcaacgtgacatgtaggatgtgatttgttaagttacactgacatctggtggccttcagtgttagaagagaaacacacgagatcctgtgatctgaaacacacatgatcaaatgtgcctttgcattttctttggtattgaaagcagacaacaccagaggcagcattaaacattaataaaatcatgaataaattaataagaacaccactatgcatatttttcaatttaataagccaaaagtataaaggatgattttcttcttcctaggccaaatcttcttaaggagcagattacagtagctttctctacagtggaatttttcaaatagacttttaagagaagaagaggaagaagaagaaaaccgtcaccactgtgtatcagcccggaggtgggtccctgcctgtgagaactgcacgtggtggactcatactgcatcttcagaggaagcagatgttcattacttatttccagaaaatgacatttattactgtgttgcaaaatcaaaatcataaaacaagcaatttgatgggctcagaaaaagtccaaatgataagaaaaggtaaattgcataatataaataaggtgtttcctccgtgtttgcagaaatacaccaaacgtgtgaccacccttcgtgaccggactacagcaataactaagccagtggggtaggaaggagaatcggatcaaaagttcacattttgatcaacgtcacatatgcttgagataaaacgctgctaacgtcaacactggactcaccccagtcatattaacattgacacgactcaccccagtcatattaacattgacaccaaacacagcctaaaactctgttaccacaaacatgacttaaacgatacaaagttaacctccatatttgctatacattctagtaatgactttgctctccttaattaaaaaaaaaaaaaaatcaaaagatcatcctcccagaccagattccaagctcagtgctttatgtacacaatcatatcattttcgtaacaccctgaaagttctgttttcattcatgagaagcccccgcaggtaatgcttggtttacgttaatgagtagatgcagactgcagtgcatctactcatttggggctcacctggggcctcacctccaaaggggctcctggagatggcagatcctgtggggcccacgctgacctctgcagccagaagccagccattgcctgtgttcagggctggccctggcagcatatggggagatgtgtgcaggagcaggcagtgagcaggctggggaggtgggcagtcctcagcttaggagaggacctacccaggcataagcgtggacctacccaggacctacccaggcatgagcgtggagagggcacagaagacctggtcagtctgaggaaggaaagagtggctgctgctaacagatagagtcaggtcaatttccccagggctgccttctgaagctggtttccatgttatgaacatgcctgaaaaggaccgtggttaaagcagctcaaactccggcaggagaatttacgaagcatccaagcccctcctctatgtgaaccaaagggtggctgtgagggttccgggggtctctaacaacagaaaacctccactggctttcaacctcacctgccagggaaggggccaggtagggatcgcgcaggccccctcagaccctcgctctgaagaacaggtgccctcacagagcatgccgacattcagaactgtcctgcagaatctggcaagtgttttaagaattgacataaagagctgagaagatgtgttgacgtcgcctctcaaaaaatctggctttaaaaaataataataaagctagtgtttttttgagcagcttccatgaacttgccttccaaagttttctgaaaacttgagaagatggggtgtgcccccacagccccagctgcctgaggttcgctgaacagcctgggtggctccgaggcgtccccgcagattcagcctgatcactccttcggtttcctcctacggctgcaggcagacctggagttcatccgggtgacctccacagtctctggccaccttccctccatttaagaaaaagaaaaacagcccatgtctgagccacctccccaaaccctctctgccttcaagcatctgacaagctaccctcaccacacaaggcccgctccctctctagagagcctctcccgacaccaaaatgtcaacctaacacgacactcaggacacagctgtcatcccgaaggcaggagatgtgggggaaaggacacagaatgaggtcacgatgccagagtcaccctcgtctcatccccgagtacccaggtgactacagacaggagaattaatctccttctcgtgggatgaagtgacagagtagacacctgtgagcccacttccagctccagttaaggtttcctctggccctgaagttctgcgactctgaggcatgtggggtgaccaagggcagaggctcccagtctgtctcaaactacaggctttgagcaaggtgagcctccctaagcttcggtttccccaacttcggtaaagtgaaataacaaaaccacgagtggctcttaacttctctgggaatgtccagccagagcctcggaatgtaactacgtggaaacagggtcctcgcagacctcattattgaaggaccttgaggtgagatcatctggatccagggtgggccctaaatgtagtgattgacgtccctgtagggagaggagaagacacggagacacagggaaggggtgttggtggagtcacgggtgggaggccccggagggacagtgcagacaagtgcccaggtgaccccagacacggagacacagggaaggggtgacgggacagtgtgctcatggggtgggaggccccggagggacagggtacacaagcacccaggtgaccccagacatggagcgtgagtaggaaattcacttggtggtgtcaggccacagagatccggacaggctgggctgcccctgcgaacccggggccctctcctccctggcacagccttattttcactcctgcagctcccgagaggaggcctcgctcttccacctgtttctgtgtcatgggacccttcacagagcaggcactcaaaacccatgagcaccccatcccttacaaccaaacgcagctccgtttctgcctcccacggcttcttcacacgcttcccagtgggttcattctcccttccccacgtaaagatgtgtgcagccacagctttccggccaccttgaaatgaggtgacatctccagtcgcttcccgtgatgaagtgcggggcctggcactgcgcactgctgcccctgctgggtcctcacagctccttcagcagcctctggggtctcacctcctggtcccctgggcccttgcacatgcccggccaccactctctggtccccccagcactcacggctcacctcctgggagccaaggcacctgcaagtcctgctgtcgtcccgggaacaggggtccccttcccgtgggagatgggatcccccaggtaacacagccagtcagagggcagcatcagaactcactcgctgtccttgtctacactaagcactcaacttcaagttgggaaacctgggtaccaagcagccaaccaacgccaatggaggtggaaggcgccgccccgcggcactcacacccgcctcagatgggagcatggtctcaggggccagggcccaggtcttatccagactcagctgctctgtgacccaggtcagtcactggccttcctcccgggctgcttctctgtggctcaggggacaataggcccatctcgttaggctgccgtgagggtgaaatgaggctgcgcacatgagactggggctgagaacatgcgtgggccaagaacacacctgccagggcccatcgcagcaccctcatcagctccagggcccatcacagcaccctcctcagctgcagggcccatcacagcaccctcctcagctccagggcccatccagtgccctcctcagcaccagggcccatccagcaccctccttagcaccagggcccatctcagcaccctcctcaacaccagggcccatctcagcaccctcctcagcaccagggcccatccagcaccctcctcaacaccagggcccatctcagcaccctcctcagcaccagggcccatctcagcaccctcctcagcaccagggcccatctcagcaccctcctcagcaccagggcccatctcagcaccctcctcaacaccagggcccatccagcgccctcctcagcaccagggcccatctcagcaccctccttagcaccagggcccatctcagcaccctcctcaacaccagggcccatccagcgccctcctcagcaccagggcccatctcagcaccctcctcagcaccagggcccatccagcgccctcctcagcaccagggcccatctcagcaccctcctcagcaccagggcccatccagcaccctcctcagcaccagggcccatctcagcaccctcctcagcaccagggcctatctcagcaccctcctcagctccagggcccatccagtgccctcctcagcaccagggcccacctcagcaccctcctcaacaccagggcccatctcagcaccctcctcagcaccagggcccatccagcaccctcctcagctccagggcccatccagcgccctcctcagcaccagggcccagctcagcaccctcctcagcaccagggcccatccagcaccctcctcagctccagggcccatctcagcaccctcctcagctccagggcccatccagtgccctcctcagcaccagggcccatctcagcaccctcctcagcaccagggcccatccagtgccctcctcaacaccagggcccatccagcgccctcctcagcaccagggcccatctcagcaccctcctcagctccagggcccatccagcaccctcctcagcaccagggcccatccagtggcctcctcagctccagggcccatccagtgcccttctcagctccagggcccgtctcagcgccctcctcagctccaggacccatccagcaccctcctcagctccaggacccatccagcgccctcctcaacatggctcccttccctctcgccactgagcagacttgataacagatgcaagctcgttccagacccacaagaaaatccacagcaagacaaattttgtgccaaagttgggttcaagatcaaaaacaatcctttgtatctcatttgtaataagtcgtaggggctcacgagaaaaggaaagataattcaattttgaatgtatgtttacatttcctaaacagctcacttagcatctgaacccgaatgcacacaaaaaaataaaacattgtctttaaggaaataaaatgcagtgggcctaacatggcccccaattggccaagtcctcttctcaactaggaaactggccactgtccactctgggcctgtgactaacacagatgaggatctcttgtccttaaccttttccgactcccctcccagaagatggcagggctcaagaggcctgaacgggaaagccccgtgtgggctccatggcgacctcagcaggcgagcccacccctctcccgggaggactaacagtgggaagacttctgtgggtgggagatgaggaccccagtctctcagcctggtgtctgtaaaactaggagaacgggcccatcctgcgggtgctggggagcctgtgggacacacaggaagcacttgtgtgtccaggcccagcggtcctgacccagccttttcagctcaacctgggccacccttaaacatggaggcaagggccaggtgtgatggctcacgcctgtaatcccagcactttgggaggccgaggcaggtgaattacctgaggtcaggagttcgagacaagcctggtcaacatggagaaaccgtgtctctactaaatcacttgaacctgggaggcggaggttgcagtgagccgtgatcgtgccactgcacttcagcctgggtgacagagacagcctctatctcaaaaaaaaaaaaaaaaaaaaaaaggaagcaaggggattcctagtgttccagcagggggagaactgtggttctagcaaatcctctaccaagtgagtaccgtgcacttccagagcgtagggaatcaggtgctcaaccccgaacggcccatagcagagctctcccgatgatgcagggcacaccaggagtgaggacagcagcactaaaccatgaggttaagacaaaggggctgacagggagcagtcacctgtgagaatttaaagagcagaattaacgggctggagcattaagccccaaaggacggatccaggagggtgcccgggcggttaacaatggctattcaggcctaagaaggaaagaaataaccttaaaatagaatcccatcccatcctcctggaccagatttcactacagtaattgcatctgtgaggaagagagctgcaaaggaaattagatgttctccgggctcagctgtaagtcatacatcagagccacccactgagaattcccattaggaagaagctggcacgagctcacatgcgggctggaggccgcccccgcttccacggcccaaaaagctgtccccaccgaggtcctcgatctggcataattgccggcattgtgccgtgcctcccgccctggccacatcaatgtggctcattcttcgaggctccactgaacgctgggagctgtgttgaaagtgggggaggggcatccactgatgaagcttccggagcatctccatccagccagctccctcacaccaactgaatgagccagcgtgctgtaaggaaaacactaccagtcatccacatgaggaggggcgggggaaggtacctctgcctgggacaaaagcctgcaaggaaaacaggagctgagcactccagccataatacaaccagctactttcctgatgatacaaccagctactttcctgatgatacaaccagctactttcctgatgatacaaccagctacttctctgatgatacaaccagctacttctctgatgatacaaccagctacttctctgatgatacaaccagctacttctctgatgatacaaacagctaatttcctgacctaccaagaggccagaaaccacacctcaactccctgcttcccaattaatctttactctgcagtccccactctgggccccagcgacagtattggtgaagagacgcaaagctgatgaatgacgtcaaacaaacaaaaacaacctgtagcaggtggcttcaagaaaccctcctgctttccttcctcaggggagagagccagcagccttgctgcctgggtttggaagggtcaccccaggccctacccaccatcctctctaagcccccaccagctgcttcagccctggatgacactggacaccacctgggaccctgaaaatgcaggtgcctgggccccacctccaccagattcagatgtcactgctccggagtgcggcctgcttaccagacttatctgagcactcccagctactgtggatgtacagaaagggtttagaaccatgggcccattctaccaacaagaactgcatataccacgggccccgcctcagagttattgttgaggacttgtccccccaccccaccctacaatggctcattaatatcccatacacgcaaatcctcgtcaaagaccctcaatgaagtatgcaggccacccatgcctcttcctcattcaattgataaatgagaaagtttcttaaggaaaaattaaacaaatcaggtgatttagcctagttttagtcactaagaagggacttcagagtagttcataaattgtctctaaggattttcaataccagagcattcctcagagggctgggtggtcccctagaagcccctgccacccctgtgtctgctgtggctggggctccacatccccatgacgtgtctggtggcagccaccacagtcctgtctcttctaggaatctaagtgttaggttctggtttcttctcttccacatccacctttggtgttggtttcagaaacagcaaatcctacaatccacggttcccaagcctgactgcacacctgaaccatccctaaatactttccacacaggtgccttccctgggccccatgcactggaggaagccttctgtgaaggtccactttggggcccaggaatgggaatccagcttcactccatagtcagccaggcttgggacaactgtggtggatgatctgattgcatccgactgtcctcccttgcaggcccaacccacagggatacatggccaaagtttagatatgcacccccagcccccaaccacacagtccagatttcaattacatggcatgttaaccgagtaactacataaagtacaaagtgtgctgccaggtgtaggcaacaaaccaccacatgttaacagccatgtgggattggtggctgcatggggattggccagggtgcctgtcactcagctcagcacagacagcaaagcatggagctgtgtggccacatcatctcccagggagaaaccaaacaacatttcgcagaagtgaattatcagaagaaagaacagacaaacaaagatataagtgcaccagagaatgaaaagggatggtgctggaagtgaaattccaaagaaaggccagggggcaggaaacagacagcctgctgggaaacatagactggctaccatgtgggacactcacggtgctgcaggaacctaaggaaggcaactcatccgcacacagcagggaagtggctgtgagggaaacgatgatatccaggggaaatggggcaataagaccttcacagtaaagggacactcagaggcacttcaccaccacaaaatggcaaagcacaaaatgttggagggcaatccagactcagaaagggattgacactcagcaagccatggggagaatgctcacaactatcacagcctagacaaggattcaagtgccacacacactacatcgagatgctctacctctcactgtccccctgtgctaagtcacagtgcactacatcaagatgctgcagctctcagtgtcccactgtgttaagttgtggtgtactacatcaagatgccgtagctctcagtgtcctggtgtaagtcacagtgtactacattgagatgctgtagctctcagtttccctgctgtgttaagtcacagtgcactacaacaagatgctctagctctcagtgtcctgctgtgttaagtcatggtgtactacatcgagatgctgaagctttcagtgtcccactgtgttaagtcatggtgtactacatcgagatgctgaagctttcagtgtcccgctgtgctgtcatggtgtactacatcgagatgctgtagctttcagtgtcccgctgtgttaagtcatggtgaactacatcgagatgctgtagctttcagtgtcccgctgtgttgtcatggtgtactacatcgagatgctctagctctcagtgtcccactgtgttaagtcatggtgtactacatcgagatgctgctgtagctctcactgtcccactctattaagtcatgatgtcctacatcgagatgctctagctctcagtgtcccactgtgttaagtcacggtgtcctacatcgagatgctctagctctcagtgtcccactgtgttaagtcacggtgtactacatcgagatgctctagctctcagtgtcccactgtgttaagtcacggtgtactacatcgagatgctctctcagtgtcccgctgtgttaagtcacggtgtactacatcgagatgctctagctttcagtgtcccgctgtgttaagtcacagtgtactacatcgagatgctctagctctccgtgtccccctgtgttaagtcatggtgtactacatcgagatgctctagctctccgtgtcccactgtgttaagtcatggtgtactacatcgagatgctctagctctcagtgtcccactgtgttaagtcacggtgtactacatcgagatgctctagctctcagtgtcccgctgtgttaagtcatggtgtactacatcgagatgctctagctttcagtgtcccactgtgttaagtcacggtgtactacatcgagatgctccagctctccatgtcccgctgtgttaagtcatggtgtactacatcaagatgctctagctctccgtgtcctgctgtgttaagtcacggtgtactacatcgagatgctctagctctcagtgtcccactgtgttgtcatggtgtactacatcgagatgctgtagctctccgtgtcctgctgtggtaagtcatggtgtactacatcgagatgctctagctctccgtgtcccgctgtgttaagtcatggtgaactacatcaagatgctctagctctcagtgtcccactgtgttgtcatggtgtactacatcgagatgctgtagctctcagtgtcccgctgtgttaagtcatggtgtactacatcgacatgctctagctctccgtgtcccactgtgttaagtcacagtgtactacatcgagatgctgtagctctccatgtcccgctgtgttaagtcacggtgtactacatcgagatgctgtagctctccgtgtcccgctgtgttaagtcacggtgtactacatcaagatgctgtagctctcagtgtccccctgtgttaagtcacggtgtactacatcgagatgctgtagctctcagtgtcccactgtgttaagtcacggtgtactacatcaagatgctgtagctctcagtgtcccactgtgttaagtcatggtgtactacatcgagatgctccagctctcagtgtcccactgtgttaagtcatgttgtactacatcaagatgctgtagctctcactgtcccactgtgttgtcacagtgtactacatcattgtcagactcactgttttcatttccatacacacttagattataagagtttgtaacgttttcacaacattacaggtcatgaaacaatcctcattttcctataagttattccagtggctcacatagtccttgccacttctccttcaccatgcaatgaggtacaacctggtattggttttgtgcttgactctgaccctcttgccatcttttgtaaggttctgtgtttaaatattgcatttcaggcagctgtggtgttgccagccttgaggcagggttctggagcctgaagacatgtgtccttggcagtaacctgtgtgtagacccacctttctgaaattagacccagatgctatctcaaagctaaaagtcattttcttgacatcaagcatttttggcctggaaagctccattttagaaaacggctgttttgcaaacattatataagctgtcaccagcaagaattccgtcactgcaagaattccttcactgcaagaattccatcattgcaagaattctgtcactgccgtaatcactcatcagagactgaggaagtctcagtcaagtgcacggggcctcgggactctcggaggtgcccagctccacagacccttccacatgggaaggcagcagagtggctgctctctttcccattccctgctctgggagtgtcagccctgactcacacagccctccttccatgtcacgccaggagcctcaccacgcagcactgcagctggaatgagtgaaatacctgatggaggacttggagaagagagtcgaattcacaagcctccagcactcggtgtggccagcattcaccactcagggatttctaagatcacacgtgatgtctgaccggactcagaagctcacacgtgatgtctgaccggacttggaagctcagcacttcgttattttattatctccaaatccaaaagaagtggcagtcattacttcaaagcccactcctgaaggaaaaggcccactgacaccagtgctggtgatgcaatccacctatgttagcattggaccccgagctgtgcctgaacctcggtgcctgcattctttactcaacaggcatctgttgaaactctgtcatgttggccactgttacaatcttgtgcacaggacctgacccctaaggtctccagagctttggggcattttatcagaggttcctgccacatttgtgtccagcacaacagtgagtaaagaactgggaacatgttctccctcccaattcctcccgttttccttcccaaggcaggcaggacacattgtctcacggcgagctggccttaccctgaactcagagcatcagcaccccaaagctgcagtgaggaggaagagactgcccacccgcgaaaaggcccctcagtcttcagccaacaccacaggcacagcttcagccctctgactcttgctgaccacgggttaccttggatcttctctcctttgagggcaactgagccacatttggctcctttcagaacatagaatcttggctttgtcttttcctgggcttggggtacctgggactccagcttcaggcacagggtccagcacacattccttcttcttcaccaaaagccaatgagatcagcatagttgcaaagctgccttatgtttttaatgagaagagttatttacaaaaagagatggcttgacaaatatcgtgcataagcaatcccaccagtgcgcattgcccctgagttcccttccctctgagacccaagctgtcatggctgtgagccatgcagatgaggtcctccttgtcatcctagtgggcttcccagaagatactccccatcatccgagtgggcttcccagaagataatcccagtgactgagtggttcctgcctcccttctccggccacatttgtgaaatatgtaagcagcatgtcttccatggaagcggggatgaagtgacggctcggagtcagtttcctccgcgtccctgttgatgagacgtggcagttgcatgaggggcaggtcacaggcggttgtggcttacagacgccctgggttccaacagggcctgacagagatgtccaattccagggatcaccttcccattcttgatcggacccataacatcttagaaagcacaatatactcagttctgcccatgtcatcctctgctcaagtatctgagttcaaggtcatttctggactgaggattcccgtaccccattagacgtgtgtggctcagatcttcagtccaggctttggaatcgagggccagccgcaccccttgttgctcccattctggctggtggtcccctggtgcacctgtcatgtcctgcacagctctcaggcctttggttgaaaagctgactggaatcacacttgaaaaaagagctcagcctgtggatattagtgacacccaccctggtaggaaatgaacatgtaaggctgagtttgtttcttggagttttcctatttattttaaagttggggtgacaagcactgggtttttgaacactgagcggagggcaacgtttcattatttatgcaaagtgcatcgacaaagcgacattgaaagtttttgccatattttcctctttgtagtttctccaagtgagatatgtcaagaagcagctttcctgtgatgtgcctcagaaataaatggaaagaaagaaacgcagcagatggcttggattaaatctgaacagtgataagttctgcttttaggacagctgggtaatgtactctttgctcaaaaacatgtttgatttgaaacacaaaaacaatcttatggtttccatgaaaatgaaagaaaaatgaagctgaatcgtggagtaaattgctagttttctccgcagcatgttctgggctgctttgggagccatatgctctgtttgatgtaaatgagatggaactgaaattaaaaagttttacatttaaaagtagtgaccaaacctattcatcaatgcctttgggcattctaataaagaatttttattagccctaaggtttggggttaaaaaaataaagtttgtcttaaccctgaacaacttgggcccaccttcattttcaggtctgtgaaatattcaagcaacagatgctgaagctagagaccaagttactgatgagggaggtagtttggttcttggcaatcaagttctgcattaataatcgagcctcatcacagaaatacttcaaatccacttttcacagaatatctactgaaaagtatcactaaaacgcaattttgctagaatccattaattttacgagctgactgaatcttcctcagagatcaaaaactgcaaaggagctagactacaaggaactgaatttcagtcaaccttttaagaaatgcagatcagaatgcaaatcctaggtaggttcttaaacagcaaaagacagcatccacgtctctgcaaaaggcttgaactctttggccagcttggttggggagagctggaatggcaggttgagaagtaccaacaaaccccatcaatggcagcttccaacaccatctgattttctgaatttcaaatctggacacggaattgagccggaaaactctgaatgctgccagattctcatttcagatgcacacacatactcttacatgtctcaaagaaagtaaaataaaaggaagatagaaagaaggaaaaagaagaaaaagaaaccctgtagtccacatgaaagagcaaatgccatctgaaggcctcagcagctacacgggatgtcatacctgggctgacgctgccggcttctggggccacccttcggacgtggtctcagtcacacccaggctgacgctgccggcttctggggccaccattcggatgtggtctcagtcacacccaggctgacactgccggcttctggggccaccattgggatgtggtctccgtcacacctgggctgacactgccggcttctggggccaccattcggacatggtctcaataatcttcccgagctcggccagctcacaggagctcaagcttacaagtagttggtgtgtaatttgcatggtcagtagagacaaagaaaggcttcaaagccactgcacactcctgctgctctccagagataaagcgaggagagggtgacgatagccaatcagggcccacgccagtttcccagataggaaccatggccgataaacccgagaccacaggtgttccatccctgctactcagcccaaagcaacaaggaagcctgaggtgacaccacaaaatgcaaatttatctccaacgctgtcacttgttaagatagcaaagaaatgagccttgatccgtgaataaactgtatacatcaactcatctgggaaacaagcaagaaacccaagagaaaccacgggggagaaaccgggatccatgttctatcccctgctgctgggccagacctgagcagcacggcagtgaaggaagtggatttggggggcttccctccacccacagtaaccttcctttgctgagtgatgcaagcctgacctttccggggagcacccatgacctcgtggggacacggtgaaccctagggacatgaaatggtcccgccctagcttcctctccagtgccctgcctgtcctgcccagggcactcccaaaatgtctcaacgaaaatgttcttagaggggaagaggtctcagagattagcccctctggttcctcattttttttttttgagacaaagtctcactctgtcacccaggctggagtgcaatggcaccatctcagctcactgcaacctccacctcctaggttcaagcgattctcctgcctcagcctcctgagtagctgagattactagtttttgtatttttagtagagacggggtttcaccacgttaaccaggctggtctcaaactcctgacctcaagtgttccgcccacctccgcctcccaaagtgctgggattacaggcatgagccaccacatccagcccctcattttctagatgaggaaagagaaactgggacattacagtccctttacggccaacactggaatggaatcctgaaaactgctttgcacggagttctgctgtggtctgtagtttgcatgtatcatttcctttaatcctcacaactcccctctaaggtggtaattaccttattttcacttttttagacgagaaagattaattcggaagaggctaaacagctccaaggtctccgagcagagaggcagccgtcggattccggaacctgctggaccaccctccaggcgcccagtgatttctccagggtggacacaggcttacgtgtggcgcaggagtgctctgtgacgtacacaaggcgcatcccacaggtggatgcagagaggccagagaggggaggcacctggcaccatcccgttctgttttcggtgcggcccgttcttcgggctttattaagcaactgcccacgtggaagaaaagcaataatgaagcaaggcgtcgtatcgattcccccagctgtaatggaattccgtcaaggagcaaagcgaggcgttttcagaaactctgcctgttaacgtttattgctcccaaagtctgattataacacactagctccgggggccgagtgaacatcacttcacacaaaaacagggacaacgtctgtgaccaccggagatgaatattagtgaaagaactgactctcccgattcctctattaacctgtctctggctacattcaaacaaatcatatgtgtgtacggaacaggctcatacacacatgccagcacgcgtaatgcccagtggtcagaaaatgctcttcaaaccggggactgagacgcccgcagagcgcggccctgagagccctgagagcagagtcaagcacgatgctgctgcctggccccagtggccatgcatgtgccgcaccctcgagaacatctggggacctcggggcccacaggcattaaccatcagcttaatctcccacgccaggtgtgctcagcaccctcgagaaggtccggggacctcggggcccaggggcattaaccatcagcttaatctcccacgccaggtgtgctcagcaccctcaagaaggtccggggatctcggggcccacaggcattaaccatcagcctaatctcccataccagctcaccaggtctggggcccgggtgtttcggagaaggcattctgtagttataactaccatccaccatcaggtgactgtcggtaaaggaggggaccctccttcatgtggccatcacttgaggccttaagacaaaaacaatcatgttcattgctgctaagaacccaaaacaataggctgaaagtcctgctgatgcactgccaggaaagacgcagagtacgagaccagtctagctgaggcctgcgcaccgccgggaaagacgcggtgtccgagtccagcctagctgaggcctgcgcaccgccgggaaagacgcggggtccgagaccagcctagctgaggcctgcgcaccgccgggaaagacccagagtccgagaccagcctagctgaggcctgcgcaccgccgggaaagacgcggtgtccgagtccagcctagctgaggcctgcgcaccgccgggaaagacgcggggtccgagaccagcctagctgaggcctgcgcaccaccgggaaagacgcggggtccgagaccagcctagctgaggcctgcgcaccgccgggaaagacgcggggtccgagaccagcctagctgaggcctgcgcaccgccgggaaagacgcggggtccgagaccagcctagctgaggcctgcgcaccgccgggaaagacccagagtccgagtccagcctagctgaggcctgcgcaccgccgggaaagacgcggggtccaagtgcagcctagctgaggcctgcgcaccgccgggaaagacgcggtgtccgagtccagcctagctgaggcctgcgcaccgccgggaaagacgcggggtccaagtgcagcctagctgaggcctgcgcaccgccgggaaagacgcggggtccgagaccagcctagctgaggcctgcgcaccgccgggaaagacgcggggtccgagtccagcctagctgaggcctgcacagcgccgggaaagacgcagagtcagtccagcctagctggggcctgcgcaccgccgggaaagacgcagagtccgagaccagcctagctggggcctgcgcaccgccgggaaagacgcagagtccgagaccagcctagctggggcctgcgcaccgccgggaaagacgcggggtccgagtccagcctagctgaggcctgcgcaccgccgggaaagacgcggtgtccgagaccagcctagctgaggcctgcgcaccgccgggaaagacgcggggtccaagtgcagcctagctgaggcctgcgcaccgccgggaaagacccagagtccgagaccagcctagctgaggcctgcgcaccgccgggaaagacgcggggtccaagtgcagcctagctgaggcctgcgcaccgccgggaaagacgcagagtccgagaccagcctagctggggcctgcgcaccgccgggaaagacgcagagtccgagaccagcctagctgaggcctgcgcaccgccgggaaagacgcggggtccgagtccagcctagctgaggcctgcgcaccgccgggaaagacggagagtccgagtccagcctagctgaggcctgcgcaccgccgggaaagacgcggggtccgagtccagcctagctgaggcctgcgcaccgccgggaaagacgcggggtccgagtccagcctagctgaggcctgcgcaccgccgggaaagacccagagtccgagtccagcctagctgaggcctgcgcaccgccgggaaagacgcggggtccgagtccagcctagctgaggcctgcgcaccgccgggaaagacgcggtgtccgagaccagcctagctgaggcctgcgcaccgccgggaaagacgcggggtccgagtccagcctagctgaggcctgcgcaccgccgggaaagacgcggtgtccgagaccagcctagctgaggcctgcgcaccgccgggaaagacgcggggtccgagtccagcctagctgaggcctgcgcaccgccgggaaagacgcggtgtccgagaccagcctagctgaggcctgcgcaccgccgggaaagacgcagagtccgagaccagcctagctgaggcctgcgcaccgccgggaaagacgcggggtccgagtccagcctagctgaggcctgcgcaccgccgggaaagacgcggtgtccgagaccagcctagctgaggcctgcgcaccaccgggaaagacgcgggtccgagaccagcctagctgaggcctgcgcaccgccgggaaagacgcggtgtccgagaccagcctagctgaggcctgcgcaccgccgggaaagacccagagtccgagtccagcctagctgaggcctgcgcaccgccgggaaagacccagagtccaagtccagcctagctggggcctgcgcaccgccgggaaagacgcggggtccgagtccagcctagctgaggcctgcgcaccgccgggaaagacgcggtgtccgagaccagcctagctgaggcctgcgcaccgccgggaaagacccagagtccgagtccagcctagctgaggcctgcgcaccgccgggaaagacgcggggtccgagtccagcctagctgaggcctgcgcaccgccgggaaagacgcggggtccgagtccagcctagctgaggcctgcgcaccgccgggaaagacccagagtccgagtccagcctagctgaggcctgcgcaccgccgggaaagacgcggggtccgagtccagcctagctgaggcctgcgcaccgccgggaaagacccagagtccgagtccagcctagctgaggcctgcgcaccgccgggaaagacgcggggtccgagtccagcctagctgaggcctgcgcaccgccgggaaagacgcggtgtccgagaccagcctagctgaggcctgcgcaccgccgggaaagacgcggggtccgagtccagcctagctgaggcctgcgcaccgccgggaaagacccagagtccgagtccagcctagctgaggcctgcgcaccgccgggaaagacgcggggtccgagaccagcctagctgaggcctgcgcaccgccgggaaagacgcggggtccgagaccagcctagctgaggcctgcacagcgccgggaaagacgcagagtccgagaccagcctagctgagtcctgcatacctaactccgccgaggacttacattctgatttcaggggttctcttagcctgtcaccaagtgtttaaagaaggttatgatgaaaccaacaagccaatccgagtgtctttaaactggggccacgaatgaaattcactcctgtaagagggcaggggagctggggcactctctcatcccaaaatggaaaaacattcatttttaacagtaataaaacatgaggtggtgaaggcacagcggcgtcggacgtgactcgcagcgcatccaagacaaggggcctgctcttggtggctcagaagacgagggcggcagcaagaccctcgggggaacccttagggaagtcaccgggttgtccttttaaacgatgtgtgccaccgcacagaaactgcaaaggagaaaactaaaattatttgtaacccaccgatctgaggaaacggctgctggcattggctgtttctctccatggttgagatcgcagtattgggacacttttacagctgcctttgtcatttaacactattccaccggaattttcttatgttcttaagaaactcctaagaagtataattttagtacctgcaaggtatctgtcacagagtcaccattactcgaccaggcctctgtttcacacagtcgggtcgtttttagtcagtgatccaagggggccgggcggtgaaccaagtctaacggaggcagtcacagttcagtgacagagttccttcctggttctgatggggaagttcagtcaccgtgtctgtatgttacttactcgcttctttcagggtcttttccaataaagacagctatttttcatggcaatggaaattataaaagcagctaccgtcatgcagatcgtcctgggggcatcccagctgcaccctggtgccgggacagccttactgcaagaaaaacagggtgtgggaggatttacgagttccagctgagccagctacatcaacctgtgggcacgtggcgggttggtggccaagcctgaactgagaccaaggctttggactcctagcactggctgtctcgcttgctaaaccgtaatagtctcatctaactgctctgtactaagaacatgcttccggatccaaccgatgtgtttcggaggtgccctacccattcaggggcagggtggggctgtcacccagtcgagaggctttcctgaagccgagagcactgggaggcagcatctgagacctctctccacagcaggagctcccccacatctccagggaagaacacgttccagcagatccacagccggcacaaaggaaaccttaggaaggtggtgctaggctctccacgctggtccttagcagctgttcctcctgcagctcagagctcagcatcccttctccaggaccttcccgccatcaggcactctctgcaccacccagctccaccaccatctctgcctcgttcccacggaccgtcagcccaatgctgggtccccactgcagcttccacaaacccttagacccgctggtgatgtgctagctccctcattcccggcctgggagagcctggcctggtcccacctccctcctgccaccctccgctcaagcacatggccatcccaacagcagagccctgtctgagaggaaagaactcagctccagaccgccagcaggcaaacatatggaaagatgggctcaactcagtttctggtttttcactaattcatggcttttttattaaatgcaatcttaatacagatggatgcaggagtgggtttccataacaggccatggatggtgagctaatggcctgaaatgtcaagtccaaatctccaaacaaaagtgatcatttaaaaggaagatgtgtgtagccgtactcgtgggacataaactgttctttttcttttcttttcttttttcttttgagatggagtctcgctctgtcgtccaggctggagtgcaatggtacaatcttggctcactgcaacctctgcctcctgggtttaagcaattctccttcctcagcctcctgagtagctgggattacaggtgcacgctaccacgcccagctaatttttgtatttttagtagagatggggtttcactatgttggccaggctggtctcaaactcctgaccttgtgatccacctgcctcggcctcccaaagtgctgagattacaggtatgagccaccacgcccagctgggacatgaagttttcttaaacaacaatgctttgtaaggatcccaagcagcagaagaatccaactgaattgaaagtgggctaaagagtgcacaaactcagcatgggatgaggtgagggagagcagcctgctggcgctcacaggctgaggggcctgtagacccggaagtcggtaccacttgtgggaagtctctggtgaagatgaaaaccaccccaggcacattcacagaaatgctctggggtttgtggaccctgggcatgttcccagaagcgctctgtggtttgcggggcctcgcacggctcagcgcggcaccccctccctgtggattcccgctctgagagtcaagatcactgcatgggagtgcattgcttcttgtcctaattgacagggaacatttggtggtgtctccaccacaagagacgcagcatggctgcgggaccagtgaagccataaagcccactcggtgccttgtggggccgacaccgtgtcactgcaggaagccgcagcccggcctggatttccaggaagcaaggccagctcagcacagacacaactcccatgacagcttgaacccagctcacccccgctatgagagaaacaccgggtgactgacctggagtgaaaacagcagtgaggaagggggaagagccccccacactctcagaatggtctctggacggagacccccaggcagtggccatctgaccctggctgtgtctgaccgtggaaccaaagcagacatgtttgagcagaaccagagcagacatgtttgactccagtcagcccttgagggagctggctaacgaggaccacccaagaccccagaacatgacaaatgcaaagagcttggactgaggaaagcaagttcaaattcttcactgtgtgattccaagcaaatcagaaccaaattcttatctgaatgttttcagtgacagatcaaagaaaagatcccagccagcgtgagccccaggcacacactgcctcacagcgggctcacactgggcccacactggcttacactgggtatacactgggctcacactggctcacactgggctcactccgggctcaacactggctcaaactgggcacacaccaggcttacactgggcacatactggccacacacttgctcacactggcttgcactgggcttagaccaggcacacaccaggcacactggctcacctcgagcacacaatggctcacactgggcacactggctcacaccaggcacacactgcctcacacgacacacactgggcacatactgggcacacactggcttgcactgggctcacaccagacacacagcaggcacactggctcacatcgagcacacactggctcacactgggcacatactggccacatactggctcacactggctcacactggccacacactggctcgcactgggcacacaccaggacacactggctcacatcgagcacacactggctcacactgggcacatactggccacacactggctcacactgggcacatactggctcacactggctcacactggccacacactggctcacaatggctcacactgggcacacaccaggacacactggctcacaccgggcacacactgggcacacactggcttacagccacccacccgagggacaggctggtgccaggggaagctgtgtctgagtgctccatcatgttatccgggacctgctcgtccctctctctgacctgcctgctggacaccaacaccagccctcaagtgccagcagtgacaagcccacctgagcagaaatgcagattctcgtccagcatcctcagagtccaatccactctaacaggatcccctttggtcacatgacccctcctgagccaatcactgcagccaggaccacggaacattctggctgactcacgggatgccttgtccagggcggggaggactcagagttctcgctggacctttaatgacgtgtgagggagaagagaaacacgacacggtcagggagacgtcacaggttttccccagatcctcaggggaaccacacacagtgactcatgaggagcggcggggccttgagccagggcgaaagcaccgggcgctccaggatcccaggctccttccctgaacaagcatccaaacctctcaagctagggctgactacaaacgacaaagtcctgtaacacagagctcagatagcggatttcaaacgttttgttcatgaaaatgtaacctctgtgtcgtcttggaacagtgttcaggagggggagggtgcaagctctggcccaggccccacctctaccagggaaggcaaacatcacttaaacgcctgcagcctcctgcgaaggttttctgagactatcagtaaagataatatgttttcaagctcctggaatatgtttaaagtattatgcaaacaaacaacagctattagaaatatcactttacaaactttttgttgagatactatgcattccaaagcgttcaccagtgagaagtacacagcttggtgctgcctgaagacgcagcctggcccgggatttccaggagcaaggccagctcagaacagatgcaacccccataaaacagagcttaagacaacctcaccctcactagaatggcttacactcctgctacaaaagaaacacctggtgactgacctggagtgaaaacaggaacgaggaagggggaagaggccccgcgccctgacaaatgtttacagaacaaacactcccacccagacatagattcataacccacaagccccgcccccatcctctcagtcaccatcattctaaattccaggctgaacgtcagctttgcctgtttgaactgtaggtccgtggaatcacactctctgctctcctgaatccggcttctttgcgcaatatcccatttgtgagagtcacctgtgtggctctgtacaacagtagctggtggttttttattgctctgtagtatttaattgcatggaacatcccacagttatttctacattcccctgtgcatagacgtgtaagttatttcagttgtaagctgttataaatcaagctgctgggaacattcttaggcctttttgtatatttaaggatgcatttctattgggtatgtactcataggagtgggattactagaccataaaagacagatatattcagcttccacagatacgaaccaagctgctaggcacattcttgtacatgtcctttgcatacctcagtctgcatttctgttgggaatacatgtatctaggagtgctattatttgatcacagggtaaaaaaaatacatagctacatttgtcactttattctgaagtttacaggcaaaagctgctgatgatacggattgatagcgatgtccacttttcattcctggcactggtaagttggtccttccttctgtttttcttgatcagccttgccagaagtgtatattcacatcttttaaagaagcaatgattggttttgttcattctctctaccgtacatttgttttctattacattatttttctttttattatattcttatatttctttaacttcaattttctgttctttttctacactctttagacatatgtcattttcaccttttcttcttttctaataaaagcatctaaggttataatttatttctaaccatagctttaacttgatcccaaaattcccaaaattgtttaatattgtatttttattatagttcagttcacaatattttcagatttctattgacatttcttctttgacaaatggggtatttagaagagtactgcttaatttccaaacatttagattttctagggatttttttttccatttgtttttagcttaatttctttggccaaagaaatactccgaatgatttcaatctttagcaatatgttaagatttgtttatctgatcaaaacatttccgtctaatagatggtcattttcaatatgtatgctgtgtgcactggaaaagaacacaggttctattttgatagttgcagtgtgtccattagatcaaggccattaatcccgttcttcagacctgcttcagcatgtctctctaaatacatgacaggacacacacaccaataataaaaacaaacatgcataaaaatgtgcattattctctccggtaattatctcaatatttgctttatacatttgaaaattatatcaggtgcatcaaatttataattactgtgtgttcctgatagaccaacccttatatttattatggccctttttatctcggaaaatgcttcctgccttaacatctactttgtatattagtttagatataccagctttctttagggtagtgttttcattgtattctcttccagcgtttcaaacttttatatctcaacattgaaggtggtcccttgcaagcagtgtggttttgttttttagtgacaatctttaatttttgagtggagtatttatctcatttatttacaatgaaattactaatatattgggatttatatcgactatcttaccttgtttttttatttgtctcatctgttttatttttccttttatcctttattgctttcttctggatggagtatttttattattattttgattccctttcttagcttgttagctattctttttgtggctattctagaaataataacacgggaccttgatttatcatggtgcaacacacatcacatcccacatggtgtcagaaaaactggatacacacatgcacataacaaaattggaccgttaccttataccatacacacacacaaatcaactaaaaatggattcatgccttaaacataacacctgaacctgtaaaccgcctagaaggaaatataggaaaaaaccttcatgacattggtcttagcaattattttttggatatgacaccaaaagctcaggcaacaaaagcagaaacagacaagggagactacatcaaactaaagtttctgcaaaagaaacaatcaacagtgaaaaggcaatctacagaacaggataaaatacttgcaaatcgtataactttttaaaaggttaatgtccaaaatgtataaggaactgctgcaacccaataaccaaaaacaaaataacctgattttttaaacgggcaaaaggacctaaatagacatttctcacaagaagaaatacaaatggactgcaggtatacaacaaaaatgctcgacatcactaatcgccagcaaaatctaaatcagcactacaatgagctatcatatcaaacttgttaggatacctattatcagaaaaaaaaaagatgagtattggtgaagactgtatactgttgtgggaatgcaaaaggtccttatggaaaacagtatacaggttcctcaaaaaattaaaaatagaactactatttgatccagcaaccccactctgggtttttacccaaaagagtcaaaatcaagatctccaaagagatacttgcattcccacactaactgtggcattatttgcaatatccaagatgtggccacaacccaaatgtccatcaacagatggatggatgttttacatgtggtatatctagacaatgaaacattactcagccttaaaaaagaagaaaatcctgctgtaagtgacagcatagatgaacctggaagacatgagctgagcgaagtaatccaggcacagaaaagataacactgatgatttcacttagacgaggcatctaaaatagtccaatgcgtagacccagagagaagaatggtggtttccaggggctgggtcggggcagggtgaggtattgctaatcaatgggtatcaagttttagttctgcaggatgaacgagtgctagagatctgcggtacagatcatggctgtcatcaacaatactgtgccatgcacttaaaatgttaagagggtggatctcatgttatatgttctttccacaaaaaaggacatggatccctgacttattagtgtaacacgcattatcgcatcctggataatgccaaaacctgagaacactaactcctttaccttctgtgccaccaatattcgtgttgatttaccaacccattgatagttcccactgctatccctgcctgccttgtttcctggtttccatgtgggtttactttcctcctgccagaagcccctgcagtcttttcccaagagtcatctgttgatggagtctctcgagttctgtctgtcttttcgtaggagtcatctgttgatggagtctctcgagttctgtctgtcttttcctaagagtcatctgttgatggagtctctcgagttctgtctgtcttttcctaagagtcatctgttgatggagtctctcgagttctgtctgtcttttcctaagagtcatctgttgatggagtctctcgagttctgtctgtcttttcctaagagtcatctgttgatggagtctctcgagttctgtctgtcttttcctaagagtcatctgttgatggagtctctcaagttctgtctgtctggtcacgtcttgatttcatctttatacctgagaaacatttccagggagtagagaacttgaattgatggggtgttttcttccatcacatgcgaggttcatcacacttctggtctccatggtttctggtgaaacaattcatcaatagagattaatttcctatgatttttctctgcttgctttccagattttctcttaaactttggtttttactaattttagagtgatgttcagaggtagggttttctttgtgttcattctgtgaggttgaactaaccacacaaaactgccaatattcaactgttgtttacctttaaaatagctatataatagattttttaaaatccaagctttggtgtctttcttcaggtttgaaaaaaatcatagctctcatcgcctcaaacattgcttctaagctgttttccttctcctcttctgggactccacctacacatatagacctttccaacagatctcctctgcctcatacactccgtcctgtactttctctcagttttgatctgttactctgcctcattatttcccagggaccttcttccagctcactcatctgctcttccttcatactcaatgttttgtgatgcccatctattgagttattagattcagctctagaatttccatttgattactttgtttatagaatcaatttttctggtgaaattttccacttaccctttattttcttgaacatatcaaccacagttattttaaaatttgactgcaacaagtataataactatctgtgggtgtactgttgtcatctgtttttgtgtcttggtcttgcttcttgacaactgaaattcagacattacatatgaaactgcagagactctgggtgagtctatcttcttaccttcctcctcactagacagccagatcgagggtagatccccttaactcaagggaggcctgagacaagaagacagacccatcattcttggaaggctcagtcacctggggtttatcctcacacctatggcatgacccatccggggctgggacctgggatgtgtgcgatggcccctctttcttagaagttcctgaattccagtttcatctcttcagcattatgagactgccagaaatcctgctctgcttttccatagctttctgatcagcctctgattcaactcaagaatttggcaaatgtgtcagaggtgaaagccacaggtgctgattgcctctgtacctactttctctttgggatccagtctcctcagggcctggtaacctttgcaatgcaaacatctatttgtgtgttgatgaccctatgaggttgccaagtgctctgtgggtttcactgcctcttctccacagcccttgcctggtttctcagcctctttcgacaggaatcacaaatgcccccaggagacaggcagcccgcagggagtgggctccctaacagtgcccctccgatgggtcttttttaagtttttttggccaggggctgtggctcacacctgtcatcccagcactttgggaggctgaggtgggcggatcacctgaggtcaggaatttgagaccagcctggccaacatggtgaaaccccgtctctactaaaaatacaaaaattagccaggcgtggtggtgcatgcctgtaatcccagctactgggaggctgaggcaggagaattgcttgaacctgggaggcagaagttgcagtgccactgcactccaacctgggcaacagagtgggactccatctcaaaaaaaaaaaagaaaaagttttattttatttttaattgacaaataattgtacatatttatgggctacggtgtgatgtttcaacacatatatacattgtggaatcatcaaaacaggctaattaacaggatcttggcctctcaaatcccggttgcctccgcagctccccaaagcaggcattctgtggattttacccagcacttctagttgttccccacaggaaatctgatccgatgcaaacagatcattatagccaagagaaggtcagttctgatcgttgttgattttcctggaatttgctaatgatgaatcgtgctgtgtgaaaatacactttaggctgatgcccagctgattagcatatagggtttagtgacatttccactgatagtgacttcctcaaagacactctgaccaggggtcagcaaaccagagccccgggacctaccccacctgtcttttcatgtagggcctgggaaaggaaaacaaaccttgggactccaaaatctccaggctaaagggaaaagtcaagctgggaactgctcagggcaaacctgcctcccattctgttcaaagtcacccctctgaggctgccctgagacaaatgcatctcattgctccctctcccctattgcttatgtaaaaatgcagattcactgagccaggctcaattgtgtattcactggaaggctggtcaaggactcaaaagaatgcaaacttttgtctcttatctatttctaacctggaagccgccatttccagtcatcccgccttactggactgaaccaaagtatgtcttacacatattgattgacgtctcatgtctccctaaaatgtataaaagcaaactgtgcccccgaccacctcgggcacatgcctcaggcccccgtccacctcctgcgcatgcctcagcccccgaccacctcaggcacaagtctcaggacttcctgaggctgtatcatggatgcatccttcaccttgccaaaatactttctaaattgactgagacctttctcagatattttgtgctcacaagcctttgagctaagaatggtttttatatttttttaagggttgtaggaaaaatgagatggagacagggacagagaagaagtggggaagagagaagaaaggaggagaaggaagagaagaagaagaggagaaggagtaagatgaggaggaggaaacagtaatctttgtggctttcaaagccaagatatttatcatttggtcctttacagataaagcttgccaactcaagttcatgaccatctctaattcttttaaatatcaagtcatgatgtgtattaatataaagattgcatattaaatgcatcttccatagacatagaaagtaaagatatgaaaatcagtttgtactgattgtaagacaagtctctgaacgaccaacaagatggcccagtctgtggagctccaggcttatttacggggtgcacctcgtagtgcccacaaggaagctagatcttttggaaataattctgcaatgtggaaataattttgcaacgtggaaatactgaggcctggggctgactgatttattgatgagaaacccagggaggcattggtttggggttctgtgacatcatgttgaggcatctgcatttcctatcacactgtactaaatcagttagaaaatatcttaatttccctatcctcacatgagtcttactgggtcctgacaacctcctggcctctcaccctaatgagtcctcatttctgagtggacatttctcccaaattcagttgcaacaacagatggtgtgtggccacagcccataaaggtagagactcatgctcaaagctgccttctggtaggcaaagtcgccacctcgaacacaccctccaaagacttgacattcagataccaaatgctccaggtccagctcccaaaagctagatggattgtccgttccattcgggcttcaaatcagaggctgtggtggctgtggtatctcaggactggtgcagtagggttctagcacagcttcaggcagacttcctcaacaacagtgatggtgatggtagtggtggtggtgatagtgaaagcagtggtggtggtgatgatggtggtaatggtagtagctatgggtgtggtggtgatgatggtggtgatggtagtgatggtaataggggtgatagtggtgatgtggtaatgatggtggtggtggcagtggcggcggtggtggtgataatgatagtggtaacaatggtggtggtgatggtggtaatactggtgatggaggtggtcgtggtgatgatggtggcagtagtgatggtggtagtgatagtgacagggtggtggtggtggtgatggtgataggggtggatagtagtggtgaaggtggtggtgatgatgacagtggtggtgacagtggtggtggtgatgttagtgatagtggtgatggtgatgggggtggtagtggtgatggtggtagtagtagtggtggtggtggtgatggcagtgacgggggtggtggtgggggcagtggtattggtggtggtggtgaaggtggtggtggtgacggtgatgatgatggtagtgatagtggtgatggtggtggtgatgatggtgatggggtagtagtggtgttggtggtagtggtggtggtgatggcagtgatgggggtggtggtagtcgtggtggtggtgacagtggtagtagtgatggtggtagtgatgggggtggtagtgatggtggtgctggtggtagtgataggggtggtagtgatggtgatggtgatagtggtgatggcagtggtagtgatggtggtgatagtgatggtgatagcagtggtggcagtggtggtgatagtgatggtgatggtggtggtggtgatggtgatagtaatggtgatggcaatgaaggtgatggtgatggtgatggtgatagtgatggtgatggtggtggtggtgatggtgatagtaatggtgatggcaatgaaggtgatggtgatggtgatcagtgatggtggtgatggtgatggcagtggtggcagtggtggtggtggtgataatgatggtcatggtagtggtggtgatggtgatagtgatggtgatggcagtggtggcagtggtggtgatagtgatggtcatggcagtggtggtgatggtgatagtgatggtgatggcagtggtggcagtggtggtgatggtaatagtgatggtgatggcagtgatagtgatagtgatggtgatggcagtggtggtggtggtgatagtgatggtgatggcagtggtggtggtggtgatagtgatggtgatggcaatggtggtgatggtgatggtgatggtgatcagtgatggtggtggtgatggcaatggtggcagtggtggtgatggtgatagcgatggtgatggcagtggtggtgatagtgatagtgatggtcatggcagtggtggtgatggtgatagtgatggtcatggcagtggtggtgatggtgatagtgatggtcatggcagtggtggtgatggtgatagtgatggtcatggcagtggtggtgatagtgatagtgatggtcatggcagtggtggtgatggtgatagtgatggtcatggcagtggtggtggtgatagtgatagtgatggtcatggcagtggtggtggtggtgatagtgatggtcatggcagtggtggtgatagtgatggtgatagtgatggtggtgacagtggtggtgatggtgatggcagtggtggcagtggtggtgatggtgatagtgatggtcacggcagtggtggtggtggtgatagtgatggtggtggcagtggtggtgatggtgatggcaatggtggcagtggtggtgatggtgatagtaatggtcatggcagtggtgatggtggcagcaaggaaatcattctctgattacctgacatggttaaaaatctgagagcaaagatgagctgagaatgtcatcatacaatgtgtaaagaagctgagcctgagaaccctgaaatgcatggtattctctatgtgcaaacgtacgagagctgaaagtgaccagttacctattcatggttatcatctgcatgatgaagaaacactgcaacctaccttttctccactagagggttggttcactagataatggcacctgcatgccatggatgctacgtatcagtattcaacagtggaagcccactcagcattcaggagtaagagatttggtaagtgataagaaaaatttgcagaactacaggattccatttttgttatgtgtgtgcccagaagagcatctaaacagacatttacccgaatgttcttcaccatgattattttggggctttaggatcgtaaggaggtgattctgattttgtggcttgtacccttctgcaccacccagccatgcagcgttccgcctgcttccttttctcctgtgtgctttaattctagttacaggaaacatgcatatgaaaaaggcacggaagggaatgtatgtttccttttttgtcagaaaataaaatgacacgtttccatttttggagaagttaaaacagattttatctcctgccaccattcttgccttacggacaagaggaggacagggcctccaagcaaatgagcacattagtgagttaaaagaaatatttataaatctagagcatagtctttggcctagaaagacggtactaaagcagacagaagccttttcaggaacacaaataagtattaaaaaaaaaaaaaaaagcaaaaaaacaccttttttgttccctttaaaccagaatgactcttaacctggtcaacaagcacattgcaaatgtcttgttcccactaggtggccacaggtcactgggcgagcgggtctttgtgggcagaggcaggagcggaggctgcggaggacgctccaagcccatcttccgtggctcagcccagcggctcccgcggctccagggcagcgccaggcatggcttctccccgaaggcacagaaggctccgaagttgccacctcttgcctgagttgccggaaatccaagggtaggtttatatcaaatcagcagacaaacttgacttctgggtaaaggctaaaatgaatcaacggagaactgacgagactgtttccccactgacgggtctgtaagagttgggggctgcccgccgcctggtcagtcacgctatgcagctcttaggttgaatcctgggctgccctggctaccaggatgcctcagggaggggaggaagcaggaggagcggcgtggggcgactcctcccaacagggggagcagcgtggagcaaatcttcctgatgggggagcggcgtggggcaaatcttcctgccaagcgtgcgagctgcttgtccccacctgggcgagccacctcttcctaccaggggtgcccatgaggtccttcctaaaagtaagactcagcagggagggttccaaggcctgtggccagcaggtgaatcacacaggagcttcctctaccatgtgaggctctgggggtccttgtctgggtgacggtgtcagagtggactgttggccaccagcaacggggctgcctgggacggccaggggcagagctgctcccatgtggcaccctaccccgagtcctgggtgtctgggctcacacccatctctggcctaccccaagtcctgggtgtctgggctcatacccgtctctgggtgtcattccagcagcaccttctcctcctttcaggatggccctgttcagtcagggtcctgccctctcccactgcacggggaggtgctagagaagggagggggcctgtgggcactgccactcacccctccaacaggcagggagacaggcacctgccccagggatgctgcagcccagcacccctccggcagcctcgcctggctccagcaagagcggaatgttcacaggcctgtccaccgtcacctcctaacaggtcctggagaggccaggccacgccagtgccatcacagactgtgctcgggaagctgaggtgagccccagccggccgtgagccccagcgcccaggcgcctcctcccctgttgcagccccactgggtccccaagtccccacccacggccagtgtttgtttctccctgaaaacctgatttgacttcactcaaaatctccacacctgctgcaaacgtcagtttgataaacctgacgctgccctcccggctgggggcaggaatctctctaccacctgtgtgagaagaggccgagcctcagagtcccaggccaaaaccctgttagagcagcttagacacagcaccaagacccccctagacccagagtgagcctaaaatgaaaagcaagtgaaagcctcggaccgtgcagctgctcgccagaacgtctcaggaaaactggctgcggcctttcctgtggaatccaaccgagatggcctcagcctgtctccctttcctcgtcctcagtgctcctcacagaccccaagacccacagggcctgcgtcacatgcacagaagccaggtcctctcctacggccatttttgggatcccaagaaagcccccagtgtcccctcactgctgtgcagcttacaccccaagttcattgctcagggcccgctctctttcatcaacaattctccccctgcatcctcttgaaaacgcggccgcacccggcggggcaccatgccagaccacggccctctgcacagcagcaagcccaccacagcgtgtggaccgtgagacctgccaccgtgacttctccccaaaagggcctgagctgggcttaaccaggagggctggggagagctggatgcccttcaccctcgctgggcaagagcctcctcccaggcatgtcccagcctcagggctttgtctccagagggggcaggccctgggtgacacagcccctcagccccactgccctgtccccgaggctggccagcccttccttatctgcacagcctgaagccttgtgtggctgactcggccctgagcttgttctcaccaccaaaggaagagccaagcgcccccacctgctcacctctgccctgactgtcctcaccctggatcccttccctaattaaatccccccgtctgcaacccaggcagggagtttccaccacactctacactgcacagcagcctccatcgcaggtggtgccgtccctgagtgcaggcgccagaaaccccaaggaggctccttggcagagcctgagccggaccagtgaccccgcggcctctcgggaacaggtcagaggctctggagggccttcaggttcgtctggccctaatctccacccacccctcgcctctgccccagcccataacggggccgtcctccaacaatgagtgggcaaaggtgcagggctgaacgcagacagccgcctgctgctcatcaagggaacagcttcctgccgcatcttggggtctatgctgcctggtggggccaggagaccctgagagggcgctctgccccaagtcagcctgtccctcctttgccccagatggctcctgctcccacctcctcctgtccccgtgagccacagagcagcagacgcatcatcagtggacactggcaagaccatgtcagtgctcagaagcctccgggtcagccctcagaccaccccatgtgagaaggtaaaccccggcgcccaggtgagccctcggaccaccgcatgtgagaagccaggacactcagcatgagcaggtaaacccgggcgcccaggtgagccttcggaccaccccacgtgagaactcaggacacgtgagaacccaggacactcagcgtgggcaggtaaaccctggtgccccagcaccccaggctcctgccccacccagcccaccaacacacagttgcccaaagtccggattcccagctcgccccaggtcttcctgggcacattctgtccttgcaaaccacttagaggttgagggactgtttatggggtgggtgtgtgcctgaatgtgtgagagacagagaaaaattacccccaatctataagctataggtaagaaaaagtacattttaattttacattaaattgaatactttcaactatattttaatgtggaaattcccaggccagtatgaggtgttgctgtggtcggaccacgctgggcccactcacgatggagtctgtcgtgagagctggagccccacccaagccacagctgcccccggcaggcaggccccacccaggctctgcaatggacacacggagacccacccgagccacagccacccccagcgggcagaccccacccggactctgcctgggccacagccgcccccggcgggcagaccccacctggaccctgcctgggctgccatggacacacggagcagcttgaaaatccaatggtccctggtgtaatttcctcagagattacttggttgatgagaaaagcagtaagttttgttgtttggtttcatctatctggatttttggtgagaattctccactgctccctgtctggggagaagcccagccccatggcagccccagcctctgtccaccatcaggcacgctgggctgtcacacagccacctgtccagggcacccatgacatccggaacccacctcaaatctggcttctgtggactgaaggcggccggcctgcagcctcctagctcctgttcccacggcctcacggcatccgtcactttcgagggtcatcacaatatgaccagaagcccacgggtggctttgaaagagatgaaggcggtgacatacgtgcccagtaaggacgcagctaggatgccaggtggggcaggccaacagcagctccaggcaggaccaggatggcctctgattgtcaaacagatttaaaatttttgctctgaaacactgaaacattccttcccaagcaaggacagagccatgaatccacagccaatctggagttcctctctgggcctgggcagcctctcctagctccccagacaacactcggtgcctccctgcagcctccaccgttaagcaaaagcgtggatgtatgaattccaatttaggttttagctaatgcttgcattccagccattaattgccttgagctaaatacctaattggctgtataaattccccaaatggaattctttggcaccaaaaaaaaagaggaaggcagctaataaccactacagagcacaagacccgtctccataattaggccctgacggactcaggccagggcggcaccacctgcccagctgggcagcccagaagcagcagggccccagggagcccggtggctcagccacacatgctgcccacgcggcccgataaggccgacccgcccagcttgctcccgctgccagagcctcttccccacctctccaggaaacaaagccacctgcacgggtacccggcctgccttgcgtcctgccaggcccctggaaagcaaacatccctccaaggcctgggccagtggtgggctgcgtcaagctgttagccaagcgggcagtgaagacgaaggctgccccgtagccagggagctgacctctctgcgcaggtgccggggtacgagcaccagcagagccgagagcgggggcagtgctgaagcccctgctgccatccacaaaggggcctcagagggttggaaatgacaagccacggtcttgccccaccccggctcctggccatgctacccagccacacggcacagggcaaatgccagcaggacacaggccctcagcccggcatcatcgtcagcccgaggatgctgggccaggccaggtgccgactcagcagggcagcaagagggcctcactgctgagggtgaagccaagcccagcatggcgtgccccactccagccactccaccgccagggctgctttctgggaccactcccaggatgaatctcacagggaaggccacaggccaggtcggcaacaacatgcccccagcagagtggcccagacacaggagcaggctgggtgtctgagaatcatccttagaacacagagagaagtggacttggaaggatataaatcagaacggtaacattattttagtatttattatacattttctaaatgtttcataatagccatgtattgcttcttaattagagaaaatagtaagttagcatgaaaaccccccaaaaagagaagagatctggggaggaggagggaggttggtttccacactgctttcatcaggccagaggcaaacagaagtctccgcagacccaggtctgggcagcgctgcagtgcaggagggtggggtggggagggggtcccctccagaggagctgagtcttcactggcgcctgatgctgaatttgaggcccccaggggagcccctcagcgggagggccgtagcatgaggggctcctcctgcagctcccactcctgggccaagggcatggggcagtcccaccttaaggtcagagctgaactgacaagtgttccccggggctcccagggcaggccccagtgagagttcccctggcactgctgctgggggcatttccagcctaagacgggttcaaggcaaccccactccagtccagccactagaacgagactggactgtccaggtgctccagccccaccagcgtttccaatggtcaggagcaacggcgttgggtggttaggagaccagtgggatgccacatatctgtggggatgaggggcacggcactttgcactttgtgtcactgtggtgtccaagatggaattaaggtgacacccccgcctcctctcaacagatgttcaggacatgaagggccgtgacaggcagcacgtgcccactcagctggattccaggttcctttgtgggactcggcaccacctgtggacaacagggtgtgtttagggtccagggactttcacaccagaggaaaagtaatcctgacttctcttccctcccagtgaacactgaaaacaatcaaacgtcaaagtccgttttctcccaggtcatgcgtggggtagggatggtgtctccaatgacagataccaaaaccaacaattccaggtacatgtcaatcccacaactcaagctcaagaagcttccagaggaagcaagggctggcccaagggcaggtgagggtggtcggcccacagggccctcccggagcagcagcagatacaatcatgctatagttcagtttgctcgaagagtggagtgtcagccttggctcaggagtcaccaagagaggacgatgcacagattcccacaacagcaagacacacagcgcagtctgagtccaaacaaacaccaataggcagaagcaagacacacagcgcgggccgagtccaaacaaacaccaacaggcagaagcaagacacatagcgcgggccgagaccaaacaccaacaggcagaagtgaacccgtgaggcttaattcatagtcaggaacatttggaggagttcagcccttacttctttgccttagtgatttccaaactcatggatgccacttcagtgtggtaatggagccaggatgagtggagagcatgtcacacatcagtttcccgcagcccctgcactggtgacccttagttcattcacaatcgcataatcccttgtgattttcctggcaaacaggaacactaaacctctttttcttcctaaaatatttggtttacaaagttaagcaaaggcaaagctacaacacaaaacgttgctgtagtacagacgaatccaaggtggccacagcacagatgaacctggtgaggatgccgtggtgccacagactgggtgactcacacagaaacgtcctcatggtctggaggctggaagtctgggatgggggtgccagcacagtctgctctggtgatggcctccgcctggcttctcaccgcgtccttacatggaggagagaggactcttcctcttcttacgagagcactggtcccttcacggaagccctgccctcaagaccccatctaacccaatcaccgcccaaaggccacctatcccatcgtgggagccccaccctcacgggtgatctaactcaatcacggcccaaaggcctctcctcccagcaccatcccctgggggtttggccttctacacactgagttcaatgagacacattcagtccataaccgctgcctcagagaatgtcttcccacacacaaggacacatacacacacactggtgaaacacaactgagattcattcttgctttttttaacctcatagatataatagagaaatgcgcacaaaaacgcatcgtatagcaaacaatattaagtgaatattcatccaaacagcactcaagaaatagtcccgccagcagctggaacccccacccctgctgcaccttcatggggagccaccgccgacttgatggaagctgtgctcacggccgcgcctgcctctgcaccagattcacagggcctgtcgtctttcacaccttccttctttcactcagcttcatgtctgtgagatgatccgagtcgccccgtcatggctaaattccactgttccattgtatgaaaataaaataatcttcctctcctccaccaccaaagtgcatgtgggtcacgtccagcctggggagactgtaaacgatgccacctacgcgcttccttgcgcatctccctgaccaggcgtacgtgtgcttctgctgcgtggagggcaaggagcgaaacctcagccgcagcaaacacacctctccacattccagcacacctgcccacctgctgtccaagcccccgaggagctcagaggttgtgtatcacagccaggtgcttccaggaactccccgccccacgtcgcagctgcacctggagctggtgcttccggtttttgcccgtctagtaggggagctgctgaatttcatacggcttccgtcttcatcactccaatttaataattaggttgaagaccattttacgtatttctcagtcatttgaattttctccttagaacttctgaaatgttttgcaaatgtttccttcgttgccttgttctcagtgatttgtcagggtcctctctgttttgaacgtgagatctttgtcggttacatgtcatttacatgtgttgaaaatattgtctcccattctgtggcttgtcttttaattaattctctttacggtgtcttttttactaagagttattcttgattttaatatagttgaaattatcagtaatttcctttgcaattagcactctttgtgtcctgtctcaaaaccttcctctccgccctaaagtcatgaaacattatattctcagttgaaaacctttatagtcttgcctttcacacccatgagcacaggagttggtgtctccgaaagaaattcggtccaggttcatcttcttctaatatggattccagctgttctcatcttccttttttatttcaaaatgtcttgaggtccttctgtgtcagcccatctacctaactccgtcttgaagatgaaccacaacttgaagggtgtttagaacgctcgcggttttttcctatgataatgtttcacagaatcattgcgcatttggttctttacacccaggcctgaacatccatcacataacttcccaggagtcaggctggtgagttaaagttatgtgaattttaatttccttagatattgggctgtcttccttaaaaaaattaattccatcgcaaaattattaaaaattcccccacgttttcttccagtacttgtaaaattccattatatttttaagtctctgtgccatctggattttattttggggtaaggagtttgggagggacccagctatgtattttccaaatgtctggccagttgtccccaaatcattactgaataatacatcttttccccaccgatttaaaatgtcatcattatcatataccaaatacccatacgcatttgggtctatttctagactttctattctttcccttcaatctgcccgtctgttccccactctggcttaagtgtcccatcactgcaaagcactgagtgtgcaagactcaacgccccacacacaactttctttttcataacttttctgtttagtctcatgtttgtgtctgaacctggactttaaagctagttcgtttaatttcaaaaaaaattgttaatatgctgttgtgataacttacatgtataggtttattcagagagaattcatatccttacagaattaaaccttctcacccagaagcactgtctcccctgcccagcgggtcctccccatctcccagtggagaccatggacctgccgggttcaccgtcgccaggctcctcaaggccttccccattctccctggttcacccaggagctctgagcacgccacgcacctgcccctgcaaccttgtcccgggcggcctcctgccaccccaccgatttcccctcccactcacagactgtggcatctcaaggtgaccttgggctggagagccaggattccagcggacacctctgggcttggggggctcgataagacaggtggagtgagtgaggtcaggaggggatgaggagggagacacaaaggaaaggaagtgaccagaacctttgggaaacacaaagaaaaactatgcaagaagagaaagtcccaacaccacagttagaagtggcacatttggggcggctgttgcaggatgaagcaggagcatctcttggaactgcacaaagagtcttctcctccagagtaacacggggtcttactctgttgccccgtggctcaggggcacagagggccccactcggcttgtctgcaatcaacgctggtacagctgcaacacagggagcaccccgaggatccacccatcactgcagctgcagggctgggcatgatgcttttaacttgacagtgtgaaaactaaatgttggctaacacagcctggacgtaggggaattgaaagaggacagtcctcaccgtacggtgcagggggcaccacagggttggctaacacagcctggacataggggaattgaaagaggacagtcctcaccgtacggtgcagggggcaccacagggttggctaacacagcctggacgtaggggaattgaaagaggacagtcctcaccgtacggtgcagggggcaccacagggttggctaacacagcctggacgtaggggaattgaaagaggacagtcctcaccgtatggtgcagggggcaccacagggttggctaacacagcctggatgtaggggaattgaaagaggacagtcctcaccgtacggtgcagggggcaccacagggttggctaacacagcctggacataggggaattgaaagagaacagtcctcaccctacagtgcagggggcaccacaggggctacacagaggaggactgagtcaactcctgatgagatggtgtggaaccatatggaaaagtggcagctgccgcaggacctcaacgtgggagaggctactgttgcccctgggtgagctcaggaaagaggggcaggatctgttgcttcttattttaagccctatattactcggcttttaagtgaaccatatatatgcattactgtcacacaaattaactgaggaaaattgaaagcctcatgtctcctaagtactaagcattcaactgacatttgttgtgcactgaccatgtgcagggaaccgacggagacacttagaaactcagcaaagcagacaagtctcctcctatgaaactcacattctaggtggggacagacaagacacaatgcacacaatcaccgatgtcaggattggggacggttgctatggaggacagacaagacacacacaatcaccgatgtcaggactggggacggttgctatggaggacagacaagacacaacgcacacaatcaccgatgtcaggattggggatggttgctatggaggacagacaagacacaacgcacacaatcaccgatgtcaggattggggatggttgctatggaggacagacaagacacaacgcacacaatcaccgatgtcaggattggggatggttgctatggaggacagacaagacacaacgcacacaatcactgatgtgaggattggggatggttgctacagaggacagacaagacacaacgcacacaatcactgatgtgaggattggggacagttgttatggaggacagacaagacacaacacacacaatcactgatgtgaggattggggacggttgctacagaggacagacaagacacaacacacacaatcactgatgtgaggattggggacagttgttatggaggacagacaagacacaacacacacaatcactgatgtgaggattggggacggttgctacagaggacagacaagatacaacacacacaatcactgatgtgaggattggggacagttgttatggaggacagacaagacacaacacacacaatcactgatgtgaggattggggacggttgctacagaggacagacaagacacaacgcacacaatcaccaatgtcaggattggggatggttgctatggaggacagacaagacacaacacacacaatcactgatgtcaggattggggatggttgctatagacaaagaagagatgaagagggtgcaggcttgggggcaggttcagtgacagcagagtggagtgtggatcattgcaatgacgagagagcctcttttggccactctgttgacctcgaacatccccccaagcagactacacactgtcaatgtgttcaaaaacagagatgacggctgttgcatggaacagacatacacagcctcagcgaccccccgggggcccctcgaaatgtgtttgtcaggctgcctccacgcagcccacaggcatggagcaaacacacgctccacttgcttcatgatgccaagcacagaacccacttcaggaaaacccaagaaatggcccccatggacccccaatcccactacttcccaccctaaaaacaaaatgaacagaaacaccacacctccaggcagccagcacagtaagcttttcacttaagtttttattatagaaatgttcaaacatacacgaaagcagagaagataacggcacggacgccatcggccacggccacccatcgctctgcagagaagacaacggcacggacgccatcggccacggccacccatcgctctgcagagaagacaacggcacggacgccatcggccacggccacccatcgctctgcagagaagacaacggcacggacgccatcggccacggccacccatcgctctgcagagaagacaacggcacggacgccatcggccacggccacccatcgctctgcagagaagacaacggcacggacgccatcggccacggccacccatcgctctgcagagaagacaacggcacggacgccatcggccacggccacccatcgctctgcagagaagacaacggcacggacgccatcggccacggccacccatcgctctgcagagaagacaacggcacggacgccatcggccacggccacccatcgctctgcagagaagacaacggcacggacgccatcggccacggccacccatcgctctgcagagaagacaacggcatggacgccatcggccatggccacccatcgctctgcagagaagacaacggcatggacgccatcggccatggccacccattactctgcagagaacataacggcacagatgccatcggccacggccacccattgctctgcagagaacataacagcacggatgccatcggccatggccacccattgctctgcagagaacataacagcatggacgccattggccatggccacccatcgctctacaaagaagataacggcatggacgccatcggccacggccacccattgctctgcagagaacataacagcatggacgccatcagccacagccccccatcgctctgcagagaagacaacgacatggacgccatcggccacggccccccatcaatctgcggagaagacaacagccacccatcactcttcagagaagataacggcatggacgccatcagccacagccccccatcactctgcagagaacataatggcacggacgccattggcaatggccccccatcgctctgcagagaacgtaacggcacggatgccatcggccacggccccccattgctccacagagaagataatggcacggatgccatcagccacagccacccatcgctctgcagagaagataacagcatggacgccattggccacagccacccattgctctgcagagaacataacagcacggacgccatcggccacggccccccatcgctctgcagagaacataatggcacggacgccatcggcaatggccccccattgctctgcagagaacataacggcacggatgccatcggccatggccccccatcgctctgcggagaacataacggcacggatgccatcggccacggccccccattgctccgcagagaagataacggcacggacgccatcggccatggccacccatcactctgcagtggctcatgtttcactccatccgtctcccctgccacccctccctgttttccagggttgagggtggagtcagttagagaaaatctactacaccatattctgtgtatctctagcaaatgaggacttatctcattttattttatttaggggagacggggtcttactctgttgcccaggctggacggcggtgacacaatcacgactcactgcagcctccacctcctgggctcaatgattcccccgcctccatctcccacagcaccaggatcaccacaactcacccacatgagggctttaaaaaatgtcatcacaaacccagtatcacaccagcaacattagttaacagcaactggtctttaataatgttctagtatccggtcagtgctaaattccattaattaaaaaaaaagtcatcttgtagttaatttgtttgaattaatatccaaggagggtccatcatacgtctacacagcaatggcgcacgcagggtggattcagtgtttgtggtttgctatgaatctgatgagccaccaagaatccaggctgagtcttctgacccctttcctgatgcttatttcctgaaagcgtccttatctgtttgcacagtatccacgctctgcattcctcctaactccaatgaacatccccagaatccccaatgagaagaaaccgtgtccctcccagggctcctcagcatctcgggtgcaatgtctctggacacttccagcgggcaggtgtctaccctggccttgataagcagacaccactagccctgaaagcaaaggtgctacctcggcctgcgggaccacagcggatgcgcggccccagtcagcacacggtgaggggcgttaccaccaaacctccctctccagggcgagcctggcctggggggagtcacagtaaagccaccgtcaaaactccttccaagttcattagcaaaggtgctacctcggcctgcgggaccacagcggatgcgcggccccagtcagcacacggtgaggggcgttaacaccaaaactcccgctccagggcgagcctggcctggggggagtcacagtaaagccaccgtcaaaactccttccaagttcattagcaaaggtgctacctcggcctgcgggaacacagcggatgcgcggccccagtcagcgcacggtgaggggcgttaacaccagacctccccctccagggcgagcctggcctggggagagtcgcagtaaagccaccgtcaaaactccttccaagttcattatttacaccctgagtgttctcagcagggccaaaacttcacacctctgactgaattttcatccatttggaagggttccgggtctcctgggagttttagaaattgggagtgagaagacgtggttgaaaactgaggtgaaagctctaagagaaagttaatttggtgtctcctgggcacttcacagctctgcagtgcccagggttccattatgcgtccctcagtgtgaaacacagcaaaccttattaaatacccttctagcaaaatcccccatcctccgagcttggcctgtgctccgcttcctcctttcctgccccagacgccacagcaaacgttatttccccgacatctggtggttttcaaaggacaatgctcagaccagtgcaccaggaagtgggccgggcgagtgatctgcagtccatcgggatgtccaggagatgctgacacaggctgagaagctcggcccccagctcccaaagcttaccacggccacctgggggaaaagctgccatgtcttagaaatattgacactggcctcattccctgaattctgatttgtcaagaggtgtggcctgaccacccggatcttttaaagctcccccggtttttaaaagctctaatagtcagcaaaatgcaaaaccacgcccccacccaacagccccatgatgtcccacgaagtcgaccgccggagccctgacaccagcatcaccctctcgtgcggtctcccaacagccctgcagagccagaaccatgatcgtccccactgcacacctcggagagctgaaagttgcacagttatttactgagtagatttgggattcaaatccaaatcctactgtgaagccggtacccccataacaccaggctgggcgggctccacgctgcctaagagcagagactctgcctcatttccccttctagtcccagcaacaagcacagagtgagacctcagcacactaaccgtggacacacctttgatcccagggccccctgaggactgcgtgatcttcagaggtgcaccctccacgcagcacaggccagacaagggaaactgcagggagcactggcaaaggacacatgtggggaagacacgagaggcaggagacggcaacatctgtgggggcacaggagagagaggacagggtgccgcggccatcacagggtgacaccggagccttggtgtggctgccctgggctggacttgctgcacacacagggccacgaggactttgggaccacacgtgctgatgtctccactgtccagaggaagacaccaaggcttgaggctgtggctccaagtgcacacagttgcacaagcacacatgcatgctgcaccacaacacccagatgagaatccagagcccccactgcctgggatgaatgggctccagaatccagagcccccactgcctgggatgaatgggctccagaatccagagcacccgcctgggacgaacaggctccagaatccagaggccccgcttgggacgaacgggctccagaatccagagccctcgcctgggacgaacgggatccagaatccagagcccctgcctgggacgaacgggctccaggggcccgcaaaaggacgtcggctctgcaccacccctacctattactctatactgagccgcaaacccatgcacgcctcagtccaaatgtcatagcttctctttctcccactaccctgagggccacacacacatgactcggagaaaggccacagcctgtgtgtcacaggatctccctaaatgtccagtggcccctgtccagccgctgtggctgcccacatcatggtgctgggccctgccgtttctccatcatagaaccaccaagaggcaaccgagaaacccaggagcatggcaacatccacagtctccaggatggggccctatctacatgctcctcctagaggggctgtgtaccgtgagcacaggagggtcatccagctacaggatgggactctatctacaagttcctgctagagggtctgtgtgccgagagcacaggagggtcatccagctacaggatgggactctatctacaagttcctgctacagtgcctgtgtgccgtcagcacaggagggtcatccagctgcaggatgggactctatctacatgctcctcctagaggggctgtgtgccgtgagcacaggagggtcatccagctgcaggatgggactctatctacaagttcctgctacagtgcctgtgtgccgtcagcacaggagggtcatccagctgcaggatgggactctatctacatgctcctcctagaggggctgtgtgccgtgagcacaggagggtcatccagctgcaggatgggactctatctacaagttcctgctacagtgcctgtgtgccgtcagcacaggagggtcatccagctgcagaatgggactctatctacaagttcctgctacagggtctgtgtgccaagagcacaggagggtcattcaactgtaggatcggactctatctacatgttcctgctacaggggctgtgtgccatgagcacaggagggtcatccagctacaggatgggactctatctacaagttcctgctagagggtctgtgtgccaagaccacaggagggtcatccagctgcagaatgggactctatctacatgctcctcctacgggggctgtgtgccgagaccacaggagggtcatccagctccaggatgggactctatctacatgttcctgctacgggggctgtgtgccgtcagcacaggagggtcatccagctgtccggaaatgaaaactcacagtcaccaagcatacgcagtgccatctgatgagaattcatctgctctgtcctgcacggtcccatgggaaagtcaagccatggccccagctcccttcctcaaccatcgttcatgatcgagcttattctgatgttgatgcaagaaatgttccacccacctttggctggcaaagcctgcctagaaatatacaagaacagatagtagttccagtaaagcacagagtacctcaaaatagaagacattacagagagaaacgtgtgcacgctggcagctagctgaaaagtcagctgatccacataaagttggttaggaaaaatcttctagagatgcagaccatcattgcacaaactacaacatcctcaaacccaagacacactgcagagaaataacagctcttcctttctactatggaggattctgcccgacagtcatgtggcttcacttaagatcagaagtgacctggtcaagaagcatagaagaaacctcaaatttccaaattcccagtctttcatttttttcttggttctatgaacaataaaatcttacagcataaaggccgggcgcggtggctcatgcctgtaatcccagcactttgggaggccgaagggggtggatcacgaggtcaagagatcaagaccatcctggctaacacagtgaaaccccgtctctactaaaaatacaaaaaaattaaccgggcgtggtggcaggcgcctgtagtcccagctactcgggaggctgaggcaggagaatggcataaacccgggaggcagagcttgcagtgagctgagatggtgccactgcactccagcctgggcaacagagcgagactccgtctcaaaaaaaaaaaaaaatcttacagcataaaaactgaagcatacagaaaatggtgaaaaaaaatatcattctaggtgcattttcttccagtgttttccaaagcataattacgtactttttccaaagcactcaaattcattctgtagcctcggggctgtctcctgccactcccactgggtactacacgcgagcatttcccggaaccatggaaagagcctcttggccacctgctgtagaggctgactgcactgttccctgctatgcttggtcatatgggttgttttaaagtttttcaacattataaataaagctgtaacaaacgtgctttcaattatttttcacccacattttaaaaacacgtctttagtgtgggttcctacagtctgagttactgagcctaaagacactggcatatttgtgacttccaaggaaacaacccatactcaccccatggcagagaatccctgccttgctgcaggagccggcgcttgggtgaacgcctcccgtccttggatagaaccgcctgggtgcttcggttcgtacttctccttccatgctttcagaccccctgtgcttccgcccacgccctgtgctgctctgctttctaggtccacacaccagggcccctctctgggaccatcttgccccaggctttgatcccaacactcgccctatatctccaaataaaaataaattgttgggttctttctggaggagtttgggtgagcttgtttatcccaggatgtcacttctcaaaggcagtgcagatcctcatacagcgggctgatgctcctgaccacctccctcccagcaggcccataaagaccctcagacgccatgcaccggaggcccctgtggcttctactatctggcatttgtctggtgtgctggcatcatctataccacacccggcctctgtcacaccttctgctctcacatgatgcgataccgtacttgcatttgacagaaaacacacagagtcctagagatgatatgtgaaaattaaggggtgcctggtcctgtctcggccatgaaaatggtggtagagaaagagggaacacctgcctgttagctttcctgaggatgacaagtcatttactgccttaaaactaagacaaaaaggagtggttcctcaatgaattcctctcccctccttccaccctgagacgtgtcatatagctgcctcaggccctgtgtttctcacgtaaaacctgtgctgatgacaggttcattttcaaacacaggaaggatgtccagctcacagtccgcaaaactacaagctaagctgcctacgattgtgtggggatccaggaaaacagaggatgagttgaaggttgggacacagaccccttcaggcaaatccacacacagctcagttttattgaagaaaatcaataacataaattatttcaaatagcagtgcaacaacttgggggttacatttattttattcagcacgaataactggttctattcccttgtgctcattttagcagtgatgatttgaactcagatcattagtttcatgtttccccagcctggctgcacattacagtcaactgtactaaaaccataaaccccaaagccccagatgggagatgccgacttggtcagtctggtataggatctggatctgtgtacttttataagcttcctacatggttctagtcatttgggcaacaccaggtagaccaagcccctcaatatgcaagtacagaactggagggccaaaagggcaggtgagcccatcatcccctaactccatcttttctcatttctgtcccccaccccaaatcatcaccattgtcaccatcatcatcattactatcatcaccatcaccatcagcatcattactatcatcaccatcaccatcagcatctcatcatcattatcattaccatcacgaccatcattgttgtcatcatcaccatcaccatcattgtcatcaccatcatgttgtcattatcattaccaccatcatcaccatcatcattaccattaccatcaccaccatcatcaccatcattgtcatcaccatatcatcatcattgttatcaccatcctcattgtcatcatcattgttgtcaatatcaccgtcaccatcatcattgttatcaccatcattgttatcatcaacaccatcatcatcatcaccatcatcgtcatcaccatatcatcactatcttcaccatcatcatcaccatcatcatccttaccatcgccatcattgccatgccatttagtaaacaatcacttcatcatcaccgtcatcatccttaccatcgccatcattgccatgccatttaataaataatccttcatcatcaccatcatcatccttaccatcaccatcattgccatgccatttagtaagtaatcacttcatcatcaccgtcatcatccttaccatcgccatcattgccatgccatttagtaagtaatcacttcatcatcaccgtcatcatccttaccatcgccatcattgccatgccatttagtaaataatccttcatcatcaccatcatcatccttaccatcgccatcattgccatgccatttagtaaataatccttcatcaccaccgtcatcatccttaccatcgccatcattgccatgccatttagtaaataatccttcatcaccaccgtcatcatccttaccatcaccatcattgccatgccatttagtaaataatccttcatcatcaccatcatcatccttaccatcgccatcattgccatgccatttagtaaataatccttcatcatcaccatcatcatccttaccatcgccatcattgccatgccatttagtaaataatccttcatcaccaccgtcatcatccttaccatcgccatcattgccatgccatttagtaaataatccttcatcatcaccatcatcatccttaccatcgccatcattgccatgccatttagtaaataatccttcatcaccaccgtcatcatccttaccatcgccatcattgccatgccatttaataaataatccttcatcatcaccatcatcatccttaccatcgccatcattgccatgccatttagtaagtaatcacttcatcatcaccgtcatcatccataccgtcaccatcattgccatgccatttagtaaacaatcacttcatcgtcaccatcatcatccttaccatcaccatcattgccatgccatttagtaaataatccttcatcaccaccgtcatcatccttaccatcgccatcattgccatgccatttagtaaataatccttcatcatcaccatcatcatccttaccatcgccatcattggcatgccatttagtaaacaatcacttcatcatcaccatcatcatccttaccatcgctatcattgccatgccaatgagtaaatatcaccagtgccagattctgtgctacacccttatgctcattatcattgaccttcagatcaatgtattatccccattttagagataagggagttgaagttcagaaaggctaagtaattttcttaggataacacagctagttacagaggctatggtgttcttatcgcagactggagctaagctgctgagatacaagtccagattccagcaccaatcagctgtgtggctgtggacatttcctaaagcatgctgggcctcctctcctgggccttgtatgtggagatactaagagtgcccatcttgcagagtttgtgcgaagtgacactctggtggctctccagccttcaaatccagtcctatcaagatccatcatgattactcccccagagactgtcttgattctcccactggatgtctcttctttcccaccccgtgacccctttgaattcttaaaatgctttcttggttcttcattcataccacaccccttactcccttactgtatctcctgtacacatcatttatttaccactttatccctgcagtagacagaagctcatgagggcattttttcattatgataactgttttcactaacattcctgagcatctaatctatgccatctaatctttagtagatactgtactaaatattttatttgcagtatcacattaaatcttactacaaagaaggcattattgctatgcttactttagagacaagcaaactgaggcttagaaagagtcagtacttggaagcactgaaaggctcagctctcacagtccaagtaccagctgtttaaccactgcacagtttatatccttcccaagacactgccctgaatgcattgatccaggggcctccagtggatgcttgggaaaagccagctacctgccacatgtgtgctggacttgggctgggcaaaaacaaacctggtctctgatcacgtaagcctagaacccagaaagccagcagttatgggtgcagtcatgtgggctaagctactttgcctggggacccgcagtcacacgtgctgagcagctttacatactttcaggccttgaacccagatccctgcctcacgcctcacacaccccacttcctgttgcatgatgcatccatgcagtaataaaatggacatccttaaagcagataacaaaatccaactcatcattttgtaaaatttttggatgtacatttgaggcgtgcaacatgatgttggatacatacatgcatactgaggtggccactgtggtcaagagttaacacctctgcctccaccctctcctagaggcaccctctgggcaaattaccagtaaacaatccaatgttgttactacatacagtcctcacgctgtgcattaggcccctgggctcactcctcccacaaaactgcagcttcctaccctctcatccacatcttctcattcctcgccactcccaccccccaaaccataaccagctttccactctctgtttctatgtagtcaacttttttttttaagattctacatatgtgtgagatcatgcagtatctgcctttctgtgcctggcttatttcacttacttcacactatttacaacatcatgtcctccaggttcatccatgttttgaaaatgacaggatctccttttttaaggctgaatagtatccattgtgtatgtataccacaattgctctatccattcatccatcagaaacacctgtactgtctccatgccctggtgaatagtgctgcaatgagcatcagggtgcagacacctcttctgcccatttaatttcttctggatctataaccaaaagaggcgttgatggtagcactgtttttaatttcttgaggaacctacacactgtttccataaacagtgtgcaagttggccaggtgcagtggctcacgcctgtaatcccagaattttgggaggctgaggcgggtggatcacttgaggtcaggagctcaagaccagcctggccaacacggtgaaaccccatctctactaaaaatataaaaattagctaggcatggtggcacatgtctgtaatcccagctactcgggaggctgaggcaggagaatcacttgaacccaggaggcagaggttgcagtgagctgagatcgtgccactgtaggacagagcgagactgtctcaaacaaagcatccaagtgtcccttttctctacacacttgccaacacttgttatcttctgtctttttgataaaagccattctcacaggtgtgagagggtaagtcactggggctctgatgtgcgtttccaatgattagtgatgctcagcacctttcccatacctgtcagccatctgtatgtcctctttggaaaaatgttctattcaggttctttgccctttttaaaattggagggtttgggggttttttggcttttgggttttttttgtgtgttgtttgtttgtttgttttgctattgagttgagtgagttccttatatattttagatattaacaccttatagatctatggtttttcaacattttctcccgccctgtaggctgccttttcattttgatggtttcctttaccgcacggcagcttttcagtttgatatagtcccactcatttattttgcttttgttgcctgtgtttttgggtcttgtccaaaacttcttgccgagaccaatgtcaaggagctcttcctgtatgttttcagagttttacagtttcagatcttgtgtttgggtctttaaccaattttgggcagatttttgagaacggtgtaaggtaaggtcccatttcattcttttgagtgtggatgtccagtttccccgaaaccatttaaagagacggctcttaccccagagtctgcttcacacctagttgaccatatatggtcaggtttatttctgggctctttgttctgttcccatctcatccttttacatggcgtgtgtttaagtcactggccaaaacttgggtaattctgctgccaaagacctgggagcccccggggaaggccctgttgatgtttctgttgctgttgcgtttgttacactgtggcaagctgttcaaattcttgctttcaccgccacccatttaccctgtgctactttacagtagctagtctaggatgcaactggaattgtggggctcaagtgaaacaatgtgcataaaatctcccgtaaattataactcacactgcatgtataagcaaaaattgtggcatttttacagtcttcctacatcttcagctaatagccttaataacaaaacacagaatattgtcactcaattagactagggttatttacctaagacaattttgcattgcaatttgcaaattcttaaatggcaaattagtcatttgcattgatttgcatgtccacagagaaatatctttcatgctaattatgtttttgctaacaaaccatagaagtaataatgaggaaactgaattccctcaccgcacctttggctttgttacacaaagcacagctggcgtttcagggtgggagggtttcatcaggatcgtcttgcccagagatcctcaactctgatagcacattacagtcacctcgggaagcttcagagaaaaagaaaggacggcaaagcctgggtcccgcccccaccccgcccctcgccgccctcagctgacattctgattcactggcgccagtttatgtctgggcatcactatttttcaaagcttccaggtgtttccaggtgttaccaccggcatggctgacccccttgttttgcacgtaagaaatccaacgtgcacagagctgtggcttgaatagagaggggtgcgcagggtggtggcagggcaagacaagcccaagcttcctgactgatgcccagtcccctatgcttgtcccacaaagatcgagactctattgtgcatacaggcatgcacaccccccacccacacacactcccggtggagcaacagcgtgcacacccacgcacactcccgatcaacaatgtgcacacccacacactcccaatcgatcaagagtatgcacacccacacacactcctggtcaatcaacagtgtgcacacccaggcacactcctggtggatcaacagtaggcacacccacacacactccgggtggatcaacactatgcacacccatgcacactcccggtggatcaacactatgcacacccacacacactccgggtggatcaacactatgcacacccacacacactcctggtggatcaacactatgcacacccatgcacactcctggtggatcaacagtgtcaggctttcagactgaggaaaggaaaacactgtttttggctgtgcacagtggctcacacctgtaaccccagcacttagggaggccaaggcaggtggatcatttgaggtcaggagtttgagaccagcctggccaacatggtgaaatcctgtctctactaaaatacaaaaatgagccagtggtggtggcaggcacttgtaatcccagctactcaggaagctgagggagcagaatcgtttgaaccccaggagggggaggttgcagtgagccaagatagcaccactgcactccagcctgggcaacagagggagaccatctcccctgtctcaacaacaacaacaacaacactagtccacaatgaacacaccaaaaaaatgtgtaaagtgtgggtctagttcttttgcatctttttaaagaaagaagaagcaaaatcccaattgttgagtcatcttcccctgtggtcagcagcttgcccagctccaccgagcactcgctcgagagcgtttctgttccttgaaaacaaatgagaacgacaacagcaagatgctcctcaatcattaaaaacaccaaagagcatctgttcgtgccccagcaagtgagagagaaaacctggccaaaaaaaaaaaaaaaaaaatgcaaagaattgggagctgggatttgttctagtgccatcataaaagaattgggagctgggatctgtcctattgcatcacaatgggctgtcgccataacaggagctgggatttgtcctagtgcatcataaaagaattgggagctgggatttgtcctattgcatcataacgggctgttgccataacaggagctgggatttgtcctagtgcatcataaaagaattgggagctggaatttgtcctagtgcctcataaaagaattgggagctgggatttgtcctagtgcctcataaaagaattgggagctgggatctgtcctagtgcatcacaacgggctgccatcataacagggcctgacatggtggaaaatcgtcaagtagaaataaaagaatctcatttggacatagtttataagcaaatatggttatagcattttatttcaacaactggggaaaaaaacataaaatttattctgttttgcagaaaaactaaggccgaccaataggatttgactgttagagagacaacaatacattttcctagtgacttgtgggataaaccgcttgttgcttgtttttattttttacatttctgcatctttccagaatctcaagtaccctggatttgacggaacttctcccggtgggtgctcaacacagcgctgccttctcctctaagagctcagctcctgaaaaggttcacgcgaggatgctcacagcagccaaatgctgggaacaacctgtgtgggtacaagcaagacgtggtgtgtccctcgacggagcacgactcagcgacaacaggagcaaagggtgggggtaggaaggtagcgttgcgtcaccccgaccggctgctcagtcagttcccaatctagctccttgttgtaccctttccgccttctctctactgcacttgaccagtcttcaaaaaattaaaaaggaacaaatgtatacagtgggaggtgaggcaagagggggtcggagcattcaccgaggtggagaacaggctcagtacatcttcccgctcatgttacagtgaaatgcgtgaccttaggtgtgtgtttccgtgagattttatagatcacatggattttttttttttttagatgaggtcttgctctgtcacccaggctggagtgcggtggtgagatctcagctcactgcaaactctgcctccaaggttcaagcgattctcctgcctcaacctcccaagtagctgggattacgtgcgtgcaccaccatgcccgactaattctgtatttttatatttttagtggagacagggtttcaccatatttttagtggagacggggtttcaccatgtcaaaggttttttttgttttgttttcataaattgcactcctgtccaacctcacagtgctcttttaattggtgagaagctgagcaaagcttcctcctctctgaaggacaataggaaaaggccagcacgagaggccagcacaagagggtggggctcttctttggaggcaaagccagcctctcctgagccagctcccctcccgcctccccctcctatggaccacgcccactggacttaccaagggatcttcaacagggtctcacccacacacagcactgctggtctccagtctctgggatttcttctaattctgaggacaagtttaaaaccttactaatggctgggcgcagtggctcacacctgtaatcccagcactttgggaggccgacgcgggtggatcacaaggtcaggagatcgagaccaacctggccaacatggtgaaaccctgtctctactaaaaatacaaaaattagctgggtgtggtggcaggtgcctgtagtcccagctactagggaggctgaggcaggagaatcgcttgaacccgggagtcagaagttgtggcgagctgagattgcgccactgcactccagcctgggggacagagcgagactccgtctcaaaaaaacaaaaacaaacaaacaaaaaaaaaaccttactaacaaaattgatttcaagctaaatgaataaagaaaaggaaaactctctacaaatcatttctctgatttctgaattgaaaagcaaccaagaagactctgacaattggcgggcgccccggccccagggcccctctcaggctgggtgcgtgtctgttgcccgttctgtcggctgagaccactgtcagggcaaagagaagacatgggacagccaggaaatgtggcccacctgactccaatcatgcttccggccccgccacggttccggccccgccacggttccggcctcgccacggttcctgccccaccacggttccattcccaccacggttcctgcaggcatttcatgtaatgcaattattcttccctgcaacattcatctgaccaatacgtgaccatttcctctcttttgccagcatcatagagagttcacaagagacaaatcaaagtcaccgtgggtcccagtagcaaatctagaacctgcatcttaaggcaaagaacgatgaaccaccataaattccgtgggcctttgagaagccgaagggtgagctgattggaggaaggatgggaagacgcccgatcagtgtggttccagatcagattctgcctgtgtgtcacccacatttaacactaagggaccaagtttgtcatctgttaaatgagaacaaaaatacatgccctgttattgtcagtgacggtgcagaaatctaacacgataacatataaaacactcagaaaggcattaacccccatgcagtgcactattattactttacgccatttcagtcacaagagcaggtgctgggtgttattccagctcaagaatatctcaaagcacccaggcctggaatagagagagcaggttccaaagcagccccaggctaagctttgcacacagactcagaccatgaacatcacccatcagttagagggaaatcactcacccttcaatgcactcttaacacagaccccacctctatggaaactgcctcaaaagacagagcagaccaacgtcccaagaatgattagacggcgcctctaaaataacaaggccgttgcatgcaagggcccgagagctggccgtccacatttcctcccaactccaccttcagtgacactgcgtcagtaactgggaggcagcagtggcggcggggcgggggccttacactagagaacccggctgcaaatcaggtcccaaatgctgcaaatgctggtggttaagcatttgcccacactgcactgctgagccactgagattaggcctgaaattagttatgggttttacccacgcaccgaaagacatgtgtttgttgtatgcataatctttagaatccacgtttggttcgatatttctgctttaatgataaaaggttttgtgcttttcaaaatggtatggccacgcacagacattatccctccaaactcctggtcgtggctgaacctcagcagcttcacggtccccaagatcaatttcctatctcctccaatcctgttagcaaatgaaccaaaattaaatcaggatttggcagatttctctaaacactgcagccactcagagtcctgctaaggagaaagagcagctgtaaacatatgtgagaacccttgaagctcttcctgccataagcacacttccgttctctgaataaacccctctgacgagctgtttcgggaggctacatccacgcccaggacagccgggagggcaagctgcagcctctgcacggcctctgctgtgtctgtgcaccctgattgagaagcctgcgtatcagagacctccaagtgccggctcgcctctccctcgtccataatttagtgacaatctccatggcaactagactccaagaaaagagaaggaaaggtttcccggctctctgagcagcgggtgcttcgtaaactgcaaaaacacattccccaaacatggtgtcccaaggacactgtcagcctcagaaaatctagagtgatctgaaatgagctcattcaaacttgacctcagctttgaaaaccacacagccatccaactgtctaacagtcaaccatgatagattggggggaaaaaaacattttaaacattaatttttaaaaaaaggttggctataaatagcttaaaaaccaaatgttttaagtatttaaaagaaaataaattgggaagcgaaaactactccagtataaatctcagatattaacattccttggggctgatatctaatttacttaatgtctttcacacaggcccatgacaacccttcatggtaaaagcaaaaaaaaaatccctttctcctacgtcagtgacatttctaggtagacatcaagatctcgcgcttaggagaccaaaagcaaaagcaggctataagcaaatgaggtcagccctggcgctgggcgggtgcagcactggcccagcccccgtgcggccccactgtgtcccctcacagctggtcatcagccacagctaagccaggccaacccaagaggcacagcgaactctacaggactccacattcaaaacttgctccttcatcaaaaagcggagtaaaccgggagattcagccatgggaaggccttggaccccaggacctctggaaaacactgcgtgtaactggcaccccgagtcaacttttccctgagaaatgctcaaccccatttagtttttggacatgcctctggaaatatgaaaatgagtttcatctactaaacaattccttatcctctcaaatctctgaaatttaagggtttagaaagttaatttgataaatgggaaagtcaacccagcagataaaagggaaaacggtctttcaagagcatcttagtaaatgctgcaggttgcacagagcatgcccatgtgcccgcccaaactacgggccacctccaccagagtcaaccgcccagcagaatgtgggcacccctcctccgagagggaccctcttcccaaggtcagctaagaggcgggtgcccgtctgagagggacccttttcccaaggtcagctaagaggcgggtgcccatctgagagggaccctcttcccaaggtcggctaagaggcgggtgaccgtctgaccactgagggagtcgggagtggggctgcccatggctttggggaagcactcgctgttcagcgggagagaagtcaaagagagaggccgggtgatgccacggggtgccctgtgggactgtgcacactgcgttctgcagacatgggcatcctggacagctgaaaacagggcaatgatgcaaactggcatttgcgcctcctggtgccccacggagacaggccctgaggagcctggtggtcctcgttcagctccagggcagatgctggcgagggaggaaggtgatcataagaaccccggctgcagcacagtctccaaccttctcatgcagaagagctgggggtgcttgggaggcaccagtttccctgacgccacggtggcaggcgggagggctcaggacccgaaaagcaacaagctcccagaggagcagcctgtggatgccaccaacgagcacagttctggggaggccccgaagggccccgaggactccccggcttcccctgtctagggaggccccgaagggccctgaggactccccagctccccctgtctggggccagatgctgctcttcctcctgcgagtgggaacagcttcagcacctgttctagttcccttgattcaggcacccccggccactctcccagcgagaccatgaagatgaggatgctggagaaaggtgaccttgtgcacgcttcgcccctgcttaacaagccagccgtgcaccagggacaatcaccaaggacgggcccactcagcagaggaacccccagcaaaacaccctcgggagggcacgcccgcctccacccccagctgacacccacaccccagccgggcactccaataccttctcggggtttttaggacatgcccctgctgggctcactctccagcttccttgaatcctacctcccctctcaggcctgtggggtcaagcagctattctaactactgtgaaattgaacttccaagccaaggcacacacacacctggagaccgtcttggttaacgggtaatttattctcttagtggggattccagtccagtctacataagcatcattaaggcagtctcacggggaagaagtttgggagtcagatattagaacttcattgtgcagaaacacaaaacccagagttctttccttaaagtcctgacttgagggaagacttgaaaatccagggctgcacatctgggctcggaaacctgcatatcatacttactacgatttgtgttcctcccgccatttgtttgttggtttgtttttgagacagagtctggctctgttgcccaggctggagtgcaaaggcttaatcactgcaacctcctcttcctgggctcaagtgatcctcccacctcagcctcccgagtagctgagaccacaggcacatgccaccacacctggctgatttttgtactttttgtagagaaggggtttcaccatgttgccaggctggtcttgaactcctgagctcaagcaattcgcctgccttggcctcccacagtgctgggattacaggcgtgagccactgcacccagtcccactgttaatttagaaccagacacatcgtttctccactatttatgactttagttacaaagccacaccagatagcaccaaattcaaatcatatcaatgacgccgatgcgcacagctgtcccaacacaagacagcagggccatccgttgccagcacatgaatgactgtaagtcaccaacaactgccagccaaggacgcacgaaggatcagcctgtgtctccgtgaaaattcacagcacagacgccgctcgggagggagaggagagagaggggccccagcaggcaccctcaccctgtctgtgccgccaaggggcctgagagtgtgaccctgacaccgagtcaatctgcttctccgcctgaggctgccaggcagcctggaggctggaaaaaaaatgtaaaacatgttcctctaaaacgagggcgtccttagcggggatgctataaatacgcccaagtaagaagagacgcgagaacgtcaatctggttctgttcctcccgcttctccttcctcccagcaaacttctgaggagagaaaagtctggaaagtttgaggagcgaaccgcatcttcagagccattgggtggggtcacatgcatacatctgagctcacatgtgtgtgagacccaaactgagctgaactgattttaactcacctcaagtcactaatctgaagtctcaatatcacgtcactttttctgttaatacaccaaataaggctgagcttcacatagttcaattcagtcattcgtttccatctccttttaggttttattcattggaatttgggagtgcaatgagactgccagtcacacggagtgatgcggtctcgtgtctcacagctgtgggtcttcccgttgcctcagcccctctgagaggatgaaggggcggggccctgcccacaaggtggctgggacatcttagatggtccggttcattactaaccaataatgcaaagatggttagaccatttcagggccctggctgctagattttcttcattaagcacatatcatgcagtcctgtctgacattttaacacgcacagaaaacagggcacacagcaaacaggaaatgtctgttacctccgagtgggagtgagatttggtgaagggacacaaaaggaatttttactttttattctagatagttccaaactgttcattttgaatatatccatatacgtataattcattttttaattgattttaattgacacacctgaaagagaaaagtgggtaatactgtaatggccaacatcttcccttttcataaaatcagactttgctgccatcatccactattaaaataataccgaagtgggtcaagagaggcaaccgagaatttgattttaaagaatgtgctgaattttctattaaagcaaaaaactctttgacaccccaatagtgtatgcttcctgtaagttcaagaaatccatgtctatttccaaggcagcatcacccacccctcaccccaggttttcagcctggcctgggatgtggataggccccctgctgcctttctggaaaaagcaactgaaagctcagccaagccacggccaggttgctcttttcagcccccatggggaccaagctgccccaacaggcaggaagcacaggcggtgtccacaactctgcctccacacatccacccttggccaggaaagagggaggcacctgaagacagagaaggggagagagcgctggtcagcggagcagggacaggaccgagagcctgtggggcaggaaaccgagtgggaagagccaaggggtggtaggcaggccatgctgcagagtcaccacggagcgtgggacaggcacggcggcaaagagagtgggctgagtgggtcatcacacagcacgggagccgcggccccaggtgctgcttgaatgaagaaggctcagcccatgactgctacgtctggtccccaggacccaaactgtccagaaatcagccagcactcctgcaggtgcactgcagtggacggctagaggagggaaagcagcgccgtacagacactcggaaaactgcagactggaaggggcgtgaaagcacaaggtcttgatcattctcctggcattcggtgctgtgcgtagggtgagcaatggacgccactggggaagagtgggaaaggaaggctcagcacgtcggtaacgaatgaggaggcagaggcccgctctgcgtctcaaagaacgggtgggatgcggagccgtgacaagggcatgggaaagaaagtggagtgggaataacgccaaaattaacctgataaggaagctgctttcaacgcatccctgagctggacccacatggagaaggaccacacaccccaaggctgcccttcagttttgacttgattctgtgggaaagagggagccactgaaggtttcatatcaggatgactgtggggggcagacgagaaacacaacttataaaagtgggctctgacttgtgtacacgccgtacagagatgtaattcagtggctgtttaattagcaacttgtgtggcagacacgttcatattctcaatgacaaggagctcctacacagtccaagaaaaagacaaaactcagtgggaatggggcaaagatgggagcagtaacttacagaagcagaggtgaaagtggccccacaggacatgaaaacacgtgtcaccgcgacagtcactggggaaacacacatctaacaatacccacattgttgggggcagtggctcccgtgtttctcagctgtggacatgccacaggacaggacccacgagtgagtgtttcgggggcagaagaggtaaagaacagaggccggagatgcagacagaccgaggtgcaaagtggctgcctgagagctgcggcctagaacaagtcaccgaactcttctgaattccaatttcctcaccctaaggctgtgaatggggctcatgttactcaatgtgagtggggcggcgtggcacaggaggtactcagcctggactttctgtgagcgctcaatacaaaacagcctggacgttgctgcaagcggcctggagctcccgaatggtgacccactcgccgacagcctccctccctctctcctccgctcttctttcctgactaaagccttcttgaagtctggaggaagcagagtgaacgcttccgttggatgagctcagaactttttttcctctccattttcatgattagcaatcacaggctgcgtctgccagctcctgctgtgatctgggggacacccagagtgcagcagcaactctgagacgcagagctgttctgttttatggaactggcaaaaaatagaataataacttttgacacctgggaggctgcggaaaagcacaatgggtttgaaaaacagatgaggtagcaactgagagatctacgctctgtgaatcacaaaccactcagagagcctggaaatgctgaggccacatggcggagagaccaggtcctggctgctgcctgtgggggtgggcagaatgagccttgcattcccggaccctccagtgcccgaaggctgattctcggagagctcacagggtactacggggtggcgggcgcaagccagctctgcggcgcagtgggcgtcatcctcgctgctgtgggagcgggggctcctgctctggagatcgactgctgtttgggtaatgacagcagcaccatgcaacaactgagccactggttctctacttggcaggaatttcccaattgggattctagattccaagaaggtagggtctggcaactgtttctgcagcacaaattgaattcactgcttgatcaaacctaaataaagagtctgaggagcacgaccttcctaggagcacgttccagctttgttccacgtcgcgggggttgcgtctcaccctgaagccttgtggcaaccctatggaggagtccatcggcaccattttcccagcagcacgtgctcatcgcctgtctctgtgctaccttttggtaatttccacagtgttggatccctgagctgtgatccgtgatctttggtgttactgtcattgttttggggcaccatgaaccgtgcccatagaagacagtgagcataactgatcaatgctgtgtgtgttctgactgcgtaactgaccagccattctcccatctcgctccctctcctccagcctccctattccctgagacacaacaatattgaaattaggctaattagcaaccctacagtggcctctaagtgttcatgtgaaagaaagagccgcacctctctcactttaaatcagaagctagaaatgattaaacttagtgaggaagccatgccgaaagccaagaataggccaaaaatgaggcctctcgtgtaaaacagttagccaagttgtgaatgtaaaggaaaagttcttggagaaaattaaaagtgctactccagaaaacgagaaagtgaaacagccttactgctcatattgagaaagtctgagtggtctggatagaccaagccagccacaatattcccttaagccagagcctaatccagagcaaggccctcactcttcaattccatgaaggctgagagaagtgaggaagctgcagaagaaaactctgaagctcgcagaggttggttcatgaggttgaaggaaaggagtcatctccataacataacagtgtaaggtgcagcagcaagtgctgatggagaagctgcagcaagctctccagaagatctggctgagatcagtgacgaaggtggctgctctaacaacagattttcaatgtagatgaaacagccttacattgaagaagatgccatctaggacttccatagctagagagaagacagcgcctgacttcaaagcttcaaagcacaggctggctctcttgtgaggagctgatgcagctgaggactttaagtcaaagccaatgcttgttcatccgagggcccttaagaatcatgctaaatctatggctgcctgtgctctgtcactggaacaaagctggatgacagcacatctgtttacagcatggtttactgaatattttaagcccactattgagacctactgctcaaaaaagattcctttcaaaatatggctgctcatcagcagtgcaccagtcacccaagagctgtgatgcagctgtacaaggaggtgggtgttgtttccatgcctgctgacacctcgtccattctgcagcccagggatcaaaaaataatttccatttcaagacatatatacaaatattttgaggtagagtcttgctctgtcgcccaagctggagtgcagtggtgcgatctcggctcactacaacctccgcctcccaggttcaagcaattccttgcctcagcctcccgcatagctgggattacaggcacatgccaccatgcccggctaatttttgtatttttagtagagacagggtttcaccatcttggccaggctggtcttgaactcctgaccttgtgatccacctgcgtcggcctcccaaagtgctgggattacagacatgagccactgcacccagccaagacttatattttagaaacacactttgtaagatgacagctgccatagatagtgattcctctgactgatctgggtaaagtaaattgaaaacctcctggaaaaaattcaccgttctagatgccattgagaacacttgcgattcatggagggaggtcaaaatagcaacattcacaggagtttggaagaggctgagtccaaccctcatgcatgactttcagggattcaggacttcagtagaggaaggaactgcagatgtggtgggaacagcaagggaaccagcattagcagagctgcctgaagatgtgaccaaattgccacaatctcatgataaaactttaacaggtgaggagttgcttcctagggacgagcaaagaaagtggtttctggagatggaatctactcctggtgaagatgctgtgagcattgtgaaaatcagaacaaaggattcagaatatcacatcaacttatttgataaggcagtggcaggggttgaaaggattgactcttaattttgaaaaatgttctactgcgggtaaaatgctaccaaacagcattgcgttctgcaaagaaatctttcatgaaggaagagtcaactgatgcagtcaattttatttgtcttattttaagaaattaacacagttgccccaagcttcaagcaaccacggccctgatcaatcagcagccattaacactgcggcaagaccctccacccgcaggaagattacaacttgctgaaagctcaggtgatcattagcatttttagcaaaaacatttttaatgaaggcctgtacattgttttttagacatagtgctattacacacttaatagaccacagcctagtaaaatgtaacttttatatgcactggaaaactagaaaatctgtgtgactcactttatcgtcatatttgctttattgcagtgccctggaattgaacccacaatatctccgaggtctgcctgtagatgctaaatcagtggttttttttatattcacaaatgagcccattcactagtttttcttgggcaatttctgaagcacacttttgggaattgatatgcaatgtttatatagactggattcagaacacgctacctcaaaatatggcagggtggccctcgagaaaacggcagaagcagaccacagaaaccagaattcccccagccccttctcctcggaggcaggtcataagaccctcattccagaggggcctccctatgcccagaggggaatgtccttatctccgaagacacagaagcagctagaagactccagacaggccttgctgagcccttcagcctatgacatcagagcacgccctttgccctccgatcacacttctgcacaactgtccataaaaacaggcttccctgtttcctgggtcttcatttctgaaggctcccatgtgacatagaaaaccggtattaaataagtgggtagggttttctcttattaatctgtcttttgttacaagtctcagccatgaacctggagaggggtgagaaattactttttccccactatggtatataaatcttttatttgagggctatgggggtgtctcttgtgccatgaaagcatgattcatttattcttgtatccactcactcaataaataatttcccactgatagcctttgctgcttgctgtggccgaaaatccaaatagggttaatcacatagcttcaaagaattagggagacactctggatttgaatattctaaagtcttccactttggggacaacgctagtgcttttagtacctaagttgcaatgggaggtgattgtttgctggaaaaactcccaaatctgagagggacaagcttattgttctgctttgtgcccagatggtggagccagcattttcaaccatcttgttttgtgttgggttgaatgtcctgggagggagcccatctgtctggggtcagggaagtaaccccttattaaagaaatgcaattctctggctatatccttcactatgcttacctccttgcctaactgtatcctcagttcttttttctttcttttaaaaaacagctttattgaaacataattcatataccacataactcagccttttaaagtataggagttggccgggcgcaatggctcatgcctgtaatcccagcacttcgggaggtcaaggtgggaggaccacttgaggtcacgagttcaagactagcctgggaaacatagtgagactccatcactgcaaaaaaaaaattttttttaaatagccaggcatgatggtgtgtgcttgtagtcccagctactagggaggctgaggtgagaggattacttgagactaggagttcaaggctgcgttaggctaggattgcaccactgcacgccaaccttggcgacagaacaagtgcttgtcttaaaaaaaacaaaaaactgtaagagtcaacggttttctgaatgttcagagttccgtgaccacctcaccgtccacctcagagcctctcagtaccaccaaagggaacctgcccctctgccatcacttcccatgcccccaacactttccccagccctacacggccacaacctactttctgtctctaccgacttacctctcctggacttatttacttatttatttacttatttatttatttagagacagagtctcactctgttgctcagactggagtgcaatggtgtgaactcggctcaccgtaacctccacctcccaggttcaagcgattctcctgcctcagcctccagagtagctgggatcacaggcacgcgccaccacgcccagctaatttttgtatttttagtggagacggggtttcaccatgttggccaggctggccgtgaactcctgatctcaagtgatctgcccgcctcggcctcctgaagtgctgggattacagggtgagcctccgccctggcctcctggacattttgtataaatgaaatcatgtcccccgtgacttttgtgactcggtttcttcctctgagcacggcgattcccaggttcctccgcgtcagtgtgccggtgcttcctgcctccctttccacggccggacagcactccaccatcacagacgtcctcggttcctggtggttttctgccctcttcagtggagaaagggcttggaatagaagaagctgcagttggagacgtgaaggctgtggctgtgacgccgccacggggagtcggctgcaggaggagcctccccaccatcagcgtggccggcggagtgagccacgagcgcaagggcacccctcccagccgctgttgctgtggccccggccgccagcgtcccgggagggcacctgcggagggaaggcagacaccctgcaacggcccgcaggcccgtgtcacctgggccaccgagcgcagggcttgtgggtcgtcacagcataattcagccttgagccacgagacacggagccgacaggtgtgtagctgagccatcctcccccacctgtcagtcaccattcttccacctccctccaaacggagagcgcgacttgctcctcttgccctcctggacgtccgggatttccgcccctgggctccagcgctatggtgtggtcgtcctgacgcactcttagaagctcggccacccctctgcgcccctcctgctcggccacccctctctgcgcccctcctgctcggccacccctctctgcgcccctcctgctcggccacccctctgcgcctctcctgctcggccacccctctctgcgcccctcctgctcggccacccctctctgcgcccctcctgctcggccacccctctctgcgcccctcctgctcggccacccctctctgcgcccctcctgctcggccacccctctctgcgcccctcctgctcggccacccctctctgcgccccgcctgctcggccacccctctctgcacccctcctgcacaggcctctcctcctttctgagctcaaagggaatggtggttccttcatgtgcctccttcccacctctcttgtccttttagcaggaacatgctcacgtgaaaaactggaaaaccagagaaatatgaagaaaataaaagtcactacccagagagagccactattcacagtgtggtgtatttctttgagctttttctgctatccacattttcgcacggctgtcatcgtattagatgctcagttttggatcctgagtttttcatttactttctcccacctgcattttccgacgttattaacaactttttgaacacttctcttttaatgtctgcttaacatttgaatcatgtgaccataacatagctttaaagaagcattctcctttgtttaatattaatgatttgtctactgttttaaaattaatacaaacaccactgcagagagcagctttgtgcttcaagttttctttagtattttgggtaatggattattttattggggcatattctcacacatcagattgccgggtcacgggccacctcccttatgtggcgtgaacgtgctggccagtcagcgtccatcacgatcacgtcaggccatgctcccaccagcagggcgtgaaagcgaccagctcacttcccgacataagcgtgatctattttaatcttcatagatttgttttccttttttctattgtggagtagttgattattatgcctttagaatgtttaggacataccacctgtgtttggatgtgtcccatttaaagttatcaaccatgaaatcaaatccgctttaaaaattctttgaaacctgttttcctcatatttaggatgcccatgtaacagcatctaaactctcttttctacaagctgttccaggattatgtgattgctttatcttaagctttctcttccagaacccttacagttttttctataataaccaaagttactccagagttatgaattaccaaggaattgacccccagggtcactttaaagtttccaatcacgacttcctcctgagggagctggcctaaaacccttacagctgaagcattcgattacgttaaatgagcatgtgcagaggctgcagtttcatagttccaattgcatattgtggtaaaatatacgtcacattaaaatttaccatcttagccattcttaagtgtacagttcggtggtgttaattacattcacactgttgatcagtcatcaccaccgtctattcccagaactcttccatcgtcccaaactgaaactccaccaattaaacactgacaccccaactgtcccccagcccctggccccatcactctaccttctgtctctatgaacttgactatctttagtacgtcacatgcgtggaatcattcagtatttgtccttttgtgactggcttatttcactcagcataacagcctcaagctccccccatgtttcagcgagtgtcagcactcacttcctcttcaaggctgcgtactattccatcatgtggatggaccacgtttcacttgtccattcgcccatcagtggacactgggctgctttcgcctttggctgttgtgcattaactgctatgaatatgggtgtgcaaacagctcttcaagtctctgcttcctgtgttatggggtacgtacccagaagtggggttgctgaggcaaattaaaaactctatttttaattttttaggaaaccaccatactgtttccctcagcaacgacgccattttacattcccatcagcagcgcacaagtgttcaatttctccacattctcaccaacaccgattttcaggggttttttaatactagccatcctaatgggtgtgaggtggtatgtttatcttttgactttctttttattaataacctctgttgggcttttaaaaaacatatccaagcttgataagattatatattcctacacgtaccttaagaaaagagagggggaaagagagagagtgagccagagggagagaaagagaccctgcggctggtgacagaatgttctagactcgcagccgccccccaccgcaccctgggctgccgcacccctggcccgccagcctcgggctaaaccagtcaccatggcaaccataaatctgagccagcacaggaaccacttctcctatcgctccccgtcagcctcgcaaagcgcagttttctaagactgggcaccactggcttcgctgtttcctagaccttcagtgcatcataaaaaaaaaaaatcaaatatcatctgtttctacaaatcaaggcctgaatatgtgtatttacatttaaattgcttttcctttccaaggaatccacagtcattatctggatatgatgttgagacgactctatgtctgggaggcaagtcaaggttgaggagaaaaatgtctgagaatgatcacagtcggacacccaggccggcctttgtcaaggagccggggagacagcctcggcttttattctgctggggctacttacggctccaattaaattaaacacacacacctgcttccattatcatcaaaagctgttgagtccaggcagacgacgtaggattttcaatatcgctatttttcttaaggctgcctccaaattaaagctgcacggagtagatgccagggagccccagggggtcctaggctgggccagaacctcacccaccacccacactgcaccccacgagctgccggttcccacttgtcacactcggcacaggaatctcccgaaagaagagaaaacagcagaagctgccgccgctgaggacctgctctcctcttggcgcctccaccgtggcttcccttcccgaccccagaagctgcctaggcacagacacagaggtgcccccagccccaaaattccatccggaacccagggctggtcccacctcagggcgcacgagctcctcggtttcgcttctcagaccctcagaggcattcacctcggctccccctggatgcaccagtgcaggggaggcctgtcctgaaaggccccaggagggcggcaccccaggccagcgccctgccctgcacctcagtcccccgccggcacccacgtctgtgcagagattagtgggtgcgaggggcctctgggcaggccccgccatcctcgctaggattaaatccgctcctgcccacagtctgaggacagatgcgcagggagctggggaaagagaaggcctcgctcagtgcgccccgggcccacacgcagcccctgacttggagaaaggcggctccgcccagcgcttttctgaggatactggagtttaaccctcccctgcgcgttcagagcgcacagcgcccagttcaccagcatgacaggcccgggtggcgtctgccctgggagatgccctctgcctgaccgcgctggagggaaggggctctgcaggacccgctgctcgccgtatttcataataactgccgtcctcatgggctttcagcccaacctgaaaacacagcgtttgcactgttttcttatccgcctgataagagaggaaaatcagtggcttaaaggacgaaaaacctggccgggcgcggtgactcacgcctgtaatcccagcagtttgggaggccgaggcgggtggatcacctgaagtcaggagttcgagaccagcctggccaacatggtgaaaccctgtctctactaaaaatacaaaaaattagccgggtgcagtggcgcacgcctgtaatcccagctactcaggaggctgaggcaggagaatcgcttgagcccaggaggcgaaggttgcagtgagaggagatagccccgctgccctccagcctgggcgacagagcgagactctgtctcaaaaaaattttttaaaaaaggatgaaaaacttgccgaaggacagagcaaaacaaaatcagaaagcaagggttggtgcgagcgatgggcgcccagaacccgggcaacctcttctccccacccaccgaggccgcagcccatggctccggggttccatccgcctcctctcggcagcgcgccccgggcggccccagctccaggccagcggcggggctcaccaggctgggcgctgcgcacggcgggcaggagaggggcagaccagggcgcagcagccaggaccccacactcaccgttcacacaggcctcggacgctccgcagaggccctcctcgagcaggcagcctgcggggaaacagagaagagacgcggtcagctggaggggaggaggggggtgcccccgaggctgccttcctggccccctggtgaatttcagagaaaccgccggtcaagcaggctcctccgacccggcttttccgagatggggccgattattctgaagccagaacgctgcgcccctgacccggccacgtgcgaggcctcctggcctagtcccggagcccagctctcacctggaccaggcccacagctctgggctgagggtcaagccggcgtcatcacaggagactctctggccgcgggagcagcagcggggccggggcctccccttgaggcctcccctgggcccggcgcctcccctggaccgggtgctcaccgcacgcaccgcgtccctggaagcaaggctgccgggcgccggggagcggaggcttccagggaggtaacgagctccgcggggagcccggctgcgtgggaagcaaaccgtggcgtccgtggccacagacaagagacgcaggagagggtcgggagaggaaaggaggcagcggaggcagcagagacgaagacgggcaggaaaggccagcgcggctgggccaggccctggaggagacgcggggcagaggcagcgcctcagtccccacccaggaaggggctccagaagctccgcggtgcctgggtggccaggcgaccccaagccacgcatcccccgcggccgagcaggctggcaaaggttggcgttcggctccacgtccacgcctgtcttaaacacagagagatgggtccagaaagcaccaccccgctagggagcggctcccgcgagggcgtgagcaccctggacaccagaaccgggagggccccagggccactaggcgggagtcgcaccgccagcaaaggccaggtgtggtgtgaacgcgcagtgtctttcactcattcctgcaaagcacagtgccttcaatgctgcttcaccagccgacaaacgcctgttcatccgctaagatccctgtggaagccccagactctcccggggctgcccaggcgtccttttcgggactcgccacactgtgcagtgactgtggattgagtgtgtatttccctctcctggagttcaggagccgggcacacgcctgtttccaccctctactgtttcctcccatgccctctgtgtgtctggcacagggcaggtgcccaggagcaaatgggtgaacaaagaaactgaggaatctggagaaagttatgaattactgagggattcacccccagggtcacgttaaagtttccagtcactacttcctcatgagggagctggcctaaaacccttacagaggaagcccttggttgccttaaaccagcacgtgcggaggctttaaaactaaacgtcattccagacctaaggcagcacagagcctagcaggacccaacgctgggagttcacaggaggaggcagcctcgctcgtctcacaacagcttcacgagccttccacagttgcagggcggcccctggctgggatctgcttcctcccaggaggtggcctaggtgcagccctggcctgcccagccagtgcctgcccagcccagtgcccaccaccatcgcctgccagcagtcacaggcgggtggacaccccacccattgacgggagcctccaatccaagcagagattgtttttggtttgggggagtttttgtttgttttgttttgaaataacaatctcatgaaaaacagatttttttttttgatggagtcttgctcttatcacccaggctggagtgcaatggagtgatcttggctcactgcgacctctgcctcccaggttcaagcaatccccctgcctcagcctcccaagtggctgggactacaggcgtgcgccagcatacccaactaatttttgtatttttagtagagacgggatttcaccatgttggccaggctggtctcgaactcctgacctcaagtgatccacctgcctcggcctcccaaagtgctgggattacaggcgtgagccaccgcgcctggccagcatttcatttcttaatcccatttacccatcagctaaccccacattcagtctgcattctctgcattatttcttcattcaacaagtgtctgagccaggcagaggaggtgaacggcctacaggagcgtggcagggaacgttctgagagacacacacctggcacttgaacagcaggaggagaggcagacaccactccccacaaaagcagtgaccttgaaaaggtcagcatggaggttagaggtcctctcagatcctcacgcagtgacctccaaggctcccctcactgcctcccagagggagagcctcagctgtgagggcccctcccgccccaggcacacagaggcgcacagagaaggagctgggagcagtaaggatgtgaccacaccggagatgtgctggaggttagtccgatgtcgtggaacgtccctggtcccggctctggcaggagctgcaggactctgctcaggattctagggtgcatctccagcgtggaggaacagagaccttgggggaaggcagatgcagggatgctgcagacacagctcacgttctaactccatgtttgtcacgtggaaatggcagatgacggagctctgctaggagaggcaccgggaagaaagcccctgttttcttcccatctctgccttaatcgtggctgacagttagatgtgatctgaatgagatgtgcatcaaatgatctcttggatcctgaccttggaaaaccacctgttactggcatgtgcccaacctgattcgttactccagaggactgatgagaagtgacagtggaaaacctgcagcactccttggtgagaggcaaacacagcagcagcatttcacatgattaccagagctgcaaatgttatgcatatttcacccagccagtggatatgctaatttgactgctaagttatttgttctaaaattacgaaagagcaaatttcattttaagtatcagccacctactaatagtaattatgaccataaatcatccagagaaaagacattttctctggcagacactggttcaacccagcccaggcgcctcgggcacacgccttcctcgagtgggctccacacccgccatgtggcggcaagtggcatcctggacttgtgtaccctgtcggctcacagactgcatacactaaggtccagatgtcattctgaggccaagaagctaaatccacaaggaaagccaacagcggcctgtggggcccttaaccttgtgtgcccagcacttaaaactggaattccttcacttcaatgtattatccacccttttgcatgaaaacatgtgacattccccaaattctcaaattgctcctctgctgaaccctatagcagggctgtggtgctcaggggttcctcctcactctgtattcacagggtatccctcctgcttcagcacagagacaagcacatccagtcatgaatgcatgtgcacacatatacacacatgcacccacaagcatgtgcacacatatacatacacacatgcacactcatacatgcatgcagtcatgcccattcacaggcacactcatgcctgcacacatacacacacgcacacctgcatgcatacacacatgcacacactcatacatgtgagcatacacctgcagacacgtacacgtatgcacacacgtacatgggtacactcatgcatgcatgcagtcatgcccattcacaggcacactcatgcctgcacacatacacacacgcacacctgcatgcatacacacatgcacacactcatacatgtgagcatacacctgcagacacgtacacgtatgcacacacgtacatgggtacactcatgcatgcatgcagtcatgcccattcacaggcacactcatgcctgcacacatacacacacgcacacctgcatgcatacacacatgcacacactcatacatgtgagcatacacctgcagacacgtacacgtatgcacacacgtacatgggtacactcatgcatgcatgcagtcatgcccattcacaggcacactcatgcctgcacacatacacgcacacctgcatgcatacacacatgcacacactcatacatgtgagcatacacctgcagacacgtacacatatgcatgcacgtacatgggtgcacgtatgcacacgtacatgggtacactcatgcatgctgatcttgttctgattctgcttccctactgtgtcctcagaactctaagcagtatcttgtcaccattgtggtgccccttttttcttacccttctcaagatgaaaatggatccagttttgcaaggagtcaggctggatctgcctctcttaccccaatcactcctaagagatgtttatggagagtttgttgttcattgtggaaatacagtaaatgtgaacagagcccaccacctctctcactggctgggaggaagctcggcacatcctgtaccacatgcacctgctctgcttcctcccatctctgggcgtcgctgtggccaaggcagacatggcctaaaaatccatggcccctgcccaaccctgtctctaccaccaccgtggaaggcccttcctgggttcaggcttctcgcctgactgccatgagggcagagaaaggctgtcatcagcagcaggatgcacacgccttctgaaatgtgtgctacactttccactgaggcccataaaatccagctgatgtgagctggcatcccacagcaggaaccaaagagggaggaggggaggttcctggacagcaggctcagcaccggcacctgttgcctccaagctgcagacaggactcctcagaagcctgtgagctgctggccactcactaatcacccttcctgagaggggctcactgaagaccctgctttgaggctggaatgaccaaggccctgggatccaactgcaaacaggaaagcatcttcccagacagcaccaacacacacagcaacgggaacgccaggaccccgtggctgtgcaaacatggagatgcaggtctgttggggaagttgctgaacctgaactgggacagcccctgagaaggggatgcgggggcttcacctgtgtcagcaccactcacttggtacaaggaacacacacagatttcctcatctaaaaaatataacgaagcagagtgaagtaatctatacccagccttttcctccctggccccgccagcctcccccgctcttcagagctcacagactccacgcccaatccgaccctgttactgtcagtcactctgtgtctttgtcctgtccccctctacagccttaaaaaaaaccatgccagcaccccaggaaccccagtccctactgcctggagcaggtcctttgatgacagatgtcacctgcagcagtggcagtctcaccaccgtgggtttcaatgccagagcccatcccagatgtgattcctgtcaaagccatgtttcccacctctccctgcagaaaacgctagggcttacgacagcctgaggctctggggttatgttaaatcacattttttcctaggaacgaacgcatcatcatagaaaaggaaggtgcagtgtttgaagagatgctctttttaaacatcatcctcatttttaacattctggagagagagcagggtgcccaggctccaaccccacctcctctgcagcaaacacaaagccatgcacctggcaaagcctcccttctcccttgcattctcagatgtaaatgaggatgcgccctgcccactgcagggggggtaagagtgaagcgcctgcctgctggcaggtgggcattgcctgggccatagctaccccccaatctcagcatcccctcctggcagcacagacccttgggaccaaggagtccccacaccccactgaggttttctaaatgtttccatcggatcgaaaacaacgtgttaaaccagggcggcatccaggcaggaatagaaagccatttccacattaagaacccctattctaggaatcagcctgaaaagtgagagattaaagcgcctcagcccggaggcggggctgcctctgccaggctgggcgtgggaggacagagacccccagaccctcatctcaggcagccctgcggtcagggcatctggcttctgtggcccaaggctcaaatgaaagctgtgattgcaatttcaaagacaaaaggaagagggagagagggaggaggaaggctcctcccagatctgtctctgacaagagggaggcagccctggcagctcctgccaggcctgattgcccatccctgactgtggcttgcggacagggcttggggggcagcagggggcagcaggagacagcgctcagcccctctgctgagagcctatgaccaagggacctggcagcggcctggacggaagccagcccacctccacatgagagggactgactgcttccctgaaagcccagtcccagtctggggacaacccctgcagtgtcccccttccctgcagcctcccccttcccttcagccttccctccccttccctgcaccccttcatcttccctgcaccccctccccttccctgtgccccctctcccttccctgcagcgtccccctttcctgtggcccctccccttccctgtgcccccttccctgcgccccttccccacgccccttcccccttccctgcgccccccttctgagccccctccccttccctgcagcctcccccttccctgcgccccctccaccttccctgagccgccctccccttccctgctccccttcccccttccctgcgccccaccttccctgcagcctcccctccccttccctgcaccccttcctcttccctgcgccccctccccttccctgcaggcctcccccttccctgcagcatcccccttccctgcgcccctccccttccctgcgccccctccaccttccctgagccgccctccccttccctgctccccttcccccttcccccttccctgcacccctcccccttccctgcagcctcccctccccttccttgcaccccctccaccttccctgtgcccccctccccttccctgctccccttccccacgccccctcccccttccctgcagcctcccctccccttccctgcaccccttgctcttccctgcaccccctccccttccctgtgccccctccccctttcctgcaggcctcccccttccctgaagcatcccccttccctgcaccccctccccttctctgcagcctctcccttccctgcgccccctcccccttccctgcgccccctcccccttccctgcgccctctcccccttccctgcgccctctcccccttccttgtgccccctccccttccctgcaccccctctcccttccctgcgccccctccccttccctgcgccccctcccccttccctgctccctctcctccttccctgcgccccctccccttccctgagccccctcccccttccctgtaccccttcccccttccctgtgccccttccttgttccctgcgcccctcccccttccctgggctgccaagcaaggggctccgttgggtgacatgcagccccaccttggccaggtgacccagccccaccctgcccactgcacgtaggggtgggtgttgctcagtccccttcacctgccgatccagagtatggagccccccagtaagtcctccccaattctgaggctttcaatcacagccccagcccagcgttttggggacccgtcccttccttgccttggccacactctcagcgcagggcatttctggaggttgacacacatggctgcattcctcgcagaggagggtccacagccaaattggtagcaggaggagggataatcacccagaagattctggaaacttcagcctcaatgcctcagagagcaggaagatgggtgccccatcctgaggactgcacggtggcctggatcttagacctacaaggcaggaccccaaaacagttattaagtggcatgttctctgcgccgctgcacactcaattgccatgaacgatgggagctgaccgctggcaagttcaggccaaggtttctcctgcaggcatgagggcctgccccctgcacagcctctgggccctgttcctgcggggacacctgtccgtcccctgtgctgggaggaggggcctgaggctcacactccttccatgctgggcctgttctgccgggcacagatgtcacacatgagcaggagctgggagggcacacacaaacatggatgagtgaccgtgccttactgcaaaggtggatccttggggctcaggcccctccaattcacctccaccccatacgcctggtcagtccgctccatcacaacggtgatgtgtgtgctcagcagaggctgaaatggccaaggtcctcctcacgtctttggcttctgtaaagtcagttcttgtttgaagctggggccacaattctaaggcagttcctgatttcagatcctcctgttcacaaaatcagcttcccacagaaaaagaaccagctcactccaccctggaagaagggcagcgagctgggtaccaggacaaccatcaagtcctgtcatttatttttaggaaaaacaaaacctcttactttgattaatttccttatttcaggttcctaattgcacagatttatttaaactctcttaagagtaagaaattgtaccaaattcaggatacctaccagaattgtttgttttatttttaaagtccaggagttactttttgggaaccgcgctctccatgctacacattcctccttcattcgtttgaagacattaagagcagcaacctcaactatatttattctaaatggcacgtggttttaatcagctcttggtttttaatcggctctggttttttgtcctcgatttcctgaaatgggataataccttcaaaagaaggatgtttgctgagtcattcttcgggactaagaaaacatttctaaccttgctttcacagataaaaagttaaagacaagctttgaaaaagtatctgatgaaaatccttgaacattaaatactgcaggtgcaggtagccaggctatgccggggatgaaatggttaagctaatctcagagaacttcaaccggtaactctcatgtgctggattaaaatatagtatgacccatgaaagaacagtaccaaaagtgagaataaagtgaagaaaggtagatgtattgctcaggattgctgagacatggcacacgtgaaccacacagcctaccctgctgtaaacgtgaactttagacatgtggtacttcagacacataatttaaaaggtaaacaagctttttagcagtactgggctgacttagttgtagtctctgatgaaagaggaaaaatccagttcatagtttctcagtcattgttaaagcaccaaagccctctaacaaaaagaccttatcatctcaagacccccttaggaaatgtgagttatatcatcattatcatcatcatcatcatcatggaaacagcctctcccacactttgatgtgcatgtgaaccagctgggccctgttaaatgagtatttctattccctgggcctgggacggagccaaagattcagcatttccaaagcactccctggtgactcgtccgctgggctgcccaccacactgagaagcaagggcatcacatgtagaaatcatccgtaaattgaaaacttgggtcagcacattataaaaattgttaaaagtaaatttaacaaactctttacaatttgttttctggatccaaattcttcatcacccggataacaaatgattggccttatacaaattattttaggccaggcccagtggctcacgtctataatcccaacacactgggaggcctagaggtcaggagttcaagaccagcttggccaacatggtgtttagtctctactaaaaaatacaaaattagctgggcatggtggtgcatgcctataatcccagctacttgggaggctgaagcaggagaatcacttgaacctgggaggtggaggtttcagtgagccaagaatgtgccactgcactccagcctgggtgacggagcaagactccatctcaaatatatgtgtgtatgtgtgtgtgtgtgtgtgtgtgtatatatatatatacacacaccctccagtgtgtgtatgtgtgtgtgtgtgtgtataattttaaattaattatgtggggaaaatcatacatcaactaatttttacaaatgtattaggttcagttttaagactggatgtatatttaaatatacattgtaatttaattaagatttaaaagacaaaaactgcttcctggccctgatgattagaactcttacacttgagctaaaaaaaaaaaaaaaaaaggtttattttgaaaactttatttttaagtgatgagataggaaagaatattgccttctgctcctttagacacctgtccacaaacaccactcgcattgtgggtgagaggaatctgcacttacaataatgaaaagacaaattagatccaattgttactacagtttccccttttaaccctgatatttgctacaggcaactggatatgccacgtgagaccttatcagaggatgggactgacactttaggaggatagtctgaggtgaatttgaaaaataatttctttttatcttcctcttgagctcgctacatttccagtgtgctgggaattactaccgtccactgtagatacaggttaattgacacagaacaaagaagaaaaactacttaaaactctgtaaaagtcccccagggaattagcaagtctcagctggtggcagctctggagggcacaggtgctgtgggtcgttaacaaaaccaggcttgggctcaaaaacatttgaaaaatgtgagttgaagtttcacacactcttctctgtggaactccgaaccttcactattccaaagggccacgctggcttcccaggaaggatcctgcagacgctgccaaacgccccagccacaaaaacgtccacccgctgcctctcactggggcgcagcaaaccagacaacagaactgaagttgaaagacgtgaccagggctgttaaacgccatccagcccaacggttttcgctcttaagcccctgcagggcctgttagaacaaagctgcggggcccagtccccgagtttctgacctaatgcgtccggagcaggccagagaacctgcatatctaaccagttcccaggcaaggccggtgctgctgggccgcgctcctcacgcggcgggtcaggcaagcggcttgcacacgcgagggtgtgacaggctccgggccacgtccgctgggagctgggctctgcggcttcccgcctcccgctcggagtccaaatgtgtgaggctcggagcactcagggcgcccttccggtaatgggaatgttatcagctttatgaagtctggtgcttttctattttcattatgttaaagcttttttaactatgacattttcgtgccttcccaggcaaagcagcaacaacccacttgcggagccgcagaggggaaatcatcactccttcctggaaggaaagatgagttttatcatctcttgtgttttaagttatcctcagaccctctccccgcccggggctacagccaagcaaacagagcactgcccagggactccaagggtctcagagcctctgtaccccccgatttcagcagatggagcgccccagttcaggaggccccagtgctcgcattcctgcacccaggacgtgatcaatgggccaatcctgaacgggagaacagcctgccttctgctgggaagccctgttcccatccccgacacaacgccaggctgaggctgaggctgccttcttgtgaatcttccaaccctgtccccagtctgggaggcagatccaagaagacagctctgtcagcagtcgcagggggggacctcctgcctccagacagcacagcagagggaggggcagtgccagagccccggccaccctgtgttggagtcagagaccaccaaaggcgctgtcacagcggccttttctgtgtagccaggcagaaaagtcaccaaggaggccaacgcgtgtttcggcagccctggattttttgaagttttatttattgaggatatgttgacccgcctggagctttcattatcgatctacttagtgtcatagagtcaagttctacccctgaaagtgagacagcctgagccaccagcaccgcgcccagctcacatcgtggcttctaaccgcgtcaccatcctcctagctctgcggatgcctgcgatgtccgaactgccttaaggtgaggcgagtgtcagcactgaacacaaagcctcaggagtgataaagccgtcacggagtaaaacgcaccatcctctcctcgttccgactctctgctcctctccctagagcttgattccatcccagggccgggagaaaagtgagagaaattgatctcagcagcttcaagcacaagaagaactggcttgctctggggtaggcaaaccatggtctgccactgccatatgtttctgtattaataaagttttatggaaacacagccacgcccacttgcttacagattgcctatggccacttttgtcctataataattcaatagttgtgacagagactggcctgaaaggaaacaatttttacaaaaaaacttagccaactcttgatttattagaaggagatcaggttcttcacaagatcaaaagaaggttagaaaactgacttggagaaatgggcaggaaacaagacaggtgcccaccagaacactgtcacaaccacacagcaccatcacatctggaccagccctggacacagccacccctcaggggtccatggccaccagccccacccctgctcctcgggacgccttcctcccggctgcacttgccgagtcccctggagcacggaaaaggctgtgtcaagtggtctcacatcccccagttcacacagcgaggctaggtggacacacccaaacctggacgtcaccacacaccacgctgttgattccacagcctgattttacaatagaaaatagattcttttcttgtcaaattcacgctgagccacttttccctcacccccagccactgtgtccatcaactactgtgtccatcagccactgtgtccatcaactactgtgtccatcaactactgtgtccatcagccactgtgtccatcagccactgtgtccatcaactactgtgtccatcagccactgtgtccatcagccactgtgtccatcaactactgtgtccatcagccactgtgtccatcaactactgtgtccatcagccactgtgtccatcagccactgtgtccatcagccactgtgtccatcaactactgtgtccatcaactactgtgtccatcagccactgtgtccatcaactactgtgtccatcagccactgtgtccatcaactactgtgtccatcagccactgtgtccataagccactgtgtccatcaactactgtgtccatcagccactgtgtccatcaactactgtgtccatcagccactgtgtccatatgactttcaccactggccccttgactccaggatgggactctcttctcatccatgtgtaattccaaactcacatttgactcagatacccagtctaaacctttctggactctaatgtcacaataccagcttctctctaccctcacagctgtgtaccatgtgcaggtttaatcaacaggtccttgatgtcttcatctgactcactgaaacaagtaggaaaaaagaaagcagaagaggtggatggaaggatggcaccccttcctcccccggcctgtctccccaccaggtttcccaaactggaagcatccgttcattgcacatctctgaagaggcagagccggcaccacaagaatggaggacttggaagtaacagtaccgaacactgatgattctactgagagaatggaaagagctcctggttacgaacaaaaagttacagatattagtcatgttaccatggacaaatcactcactctgtctgcacctgttcacttgaaacattattgggaactggccagccacggtggctcacgcctgtaatcccagcactttgggaggccgaggcaggcagatcatttgagggcaggagttgtagaccagcctggccaacgtggagaaaccctgtctctactaaaaatacaaaaattagccaggcgtggtggtgtgtgcctataatcccagctacttggggggccaaggcaggagaatcgcttgaacccgggagtcggaggttgcagtgagccacactccagcctgggggacaagagtgagactgtctcaaaaaaaaaaaaatggaaaaaaaattattgggaattgttttatatcataaaagcctagaaaattaagaaaatgcagaaaatctcaaagaataatacaataccagttaactcattacctagagataaattccttgttaatattttggttttcagctacttttctttgcatatatgaaagacctggggtcatactgtacacacacctttaatttttgtccaacttatacatcctggggtccatgtccaggatgtgcaggtttgtcacataggtaagtgtgtgccatggtggtttcctgcacagagcatcccctcacctgggtatttaggccagcgtccattagcaattattcctgtgctctccctgcccacccccacaacaggtgcccagtctgtgtcgttccccccccatgtgtccatgtgctcccgtcattcagctcccacttataagtgagaacatgcagtgtttggttttctgttcctgtgttagtttgccgaggataacagcttcccgctccatccatgtccctgcaaaggacatgatctcactcttttctacggctgcatagtagtccatggtgtgtacgtatgtaccacactttctttatccagtccctcactgatgggcatttaggttggttccatgtctctgctgttgtgtacacacaactttataacctgcactttttacttataacacattgtgaacaattccctgtccttagtatttctcatcatgaattttaatcactgcttaataactatttctacacatgcacatcatctagctaaccaattccctcttgaagaaactttacattgtttccaatatttcccattaaaaataatactgcaatacgcaatcttgattgtaagtccttggagagatctctgattttttcctcttaggatacattcccataaaaagaattctagatattttaaaggtatatatgtaagactttcaaaatatcttgccaaattgccctgtcaccaacagaatatgagtgaaccttgaaacctcagcttcttaatttgttaaaatgcaaactatgttcccctcctcaccctatagggttgccgggaaaatccaaggctctaacaaaagttaaaacatgaactctgatgcaggtaggattatcatcgcatcataaatcactcagggacctgcctcttttttcccactatatcactgaggcataagtctgaaccactgttagtcaaaaaaatgcataaatgaaataaaataatataaacccatgggacacttctggcaaaatgaagcctccaggcaaggccatgctttgggacctgctgatgcgatttgctgccacctccagaaccaccaagacggagtaaaagcttttcgttccatgtgcagctgtgtgtgctccatgagcgtgcagaattctctctgttggctggttcccaggccattccttctctacaaaggtgacatctaatcatgcacaatggaacacctgtgtggtgtccaagtcccccgttcactaccagagaaaaattaatgcagggctgtcaacaggctcctaaggttaaataacaatagttttaaaatcctgagctgtaacacaaaggcacatttaatttgaaagcatgtatttctgcctctgccttttggtttagaggacttcattctgccctggacagtgagaagagggaatggggagaggaagaggaagaaaaggagtgtgaagtaggagggaacggaggagccggggtgggaggggggtggggtgacctgagcacgcgcctcactcctggaaccctgattcttccaccgtacacgtgtatgccatcaccatgccctgcgtccttaaggggttcaatgtggtgctaaataacatgagcccaaatagtgcctgccataagcaggcatccagtaatcccaagtggtggctgttaacaacacactgagtaccacctggcagctacagtgggtcagacgctgcaccgggtacagcaggaagcacagagcccaccgcgcgtcctcacatgtgatggccgaggggccacctcagggctgcagagggtgaggagggcaaagagctggaatttccagagggcttgggacgtgctctggtacagggcacacaaggccggtgctgagacactgtgcagctgggagagggcgagttctgtggggaagcacagagaaagcagaggctccatgggaggcttcggcgtcggacaaccccagtggaacaggcgggccattaggagaacacaggaaagtgagacacacacaaggaagtcccctctccccggaggtgccagactcaggtggggctgccactggcagcaatcatgaagaacatggccaaggctgcgggctccacagtgaggctgaggattgaacctgagtttgagcccagctttgtcctccttcagtagaatgactaagtgacaccggccacacaggtgtggtggcaattgtgcagagcaaagcacttcagaggcttcctgagccaagcacacgggagaggaacccacccaggccacctcccgcctagcacctactgcatctaatacccacacttcatttattttgcttaacatccgtcttctccttgaatgggagccctacaggcccggggtctacaggagccccatgaacagtggacttttggccaccaaggcagtggtgtgatgatggtgacagccacggaggagtgtggctactggcaggaagggccccgatcctcccccaaccccacctccacccaggcttggccactggctagctgtgacatgacaaggcggatgccgggggcctccgaaggcctgggtgtctcctcactcccccgcccctccgccatcgccataggaaggacacacctgggccagcccgatggttgcaagagcaggatggcaggtgcatgggcagagacactagggccagcccagcccggagcagccacaaccaatcatgaaggacaccgctctggttcggggtggtttgatggctggccaataccagggattccaacctgactagagaggccccagcatggtcagctgaggaacatcaggaggttactggggggaatgggctctgagctaggtttgaagggtggagaggcagggagaggggtgggtaagctatgggtcagaacaggcatccatgaggatctctcaggacccagggcttggatgtggggcaaggactgcacacatggatgtcagtgaggaccgtccaggggacagccctgcactaggcaggaaattgcacacagagaggtcagtgaggactgtccaggggatagcgctgcagtgtgcaggagactgcacacaagaaggtcagtgaggaccatccaggggatagccctgcgctgggcaggaaatcacacacatggaggtcagtgaggaccatccaggggacagccccgcactaggcaggaaattgcacaaacagaggtcagtgaggaccatccaggggacagccctgtgctgggcaggaaatcacacacatgaaggtcagtgaggaacatccaggggacagccctgcgctgggcgggaaatcacacacatgaaggtgagtgaggaatatccaggggacagccccgtgctaggcaggaaattgcacacacgaaggtcagtgaggaacatccaggggacagccctgctctgggcaggaaatcacacacatgaaggtcagtgaggaacatccaggggacagccctgcgctgggcgggaaatcacacacatgaaggtgagtgaggaatatccaggggacagccccatgctaggcaggaaattgcacacacagaggtcagtgaggaccatccagggaacagcctctgcaacaggcagtggacaggagaccgcatgcacggaggtcagtgaggactgcccaggggatagcgctgcagtgtgcaggagactgcacacatgaagatcagtgaggaccatccaggggacagccctgcgctgggcaggaaatcacacacatggaggtcagtgaggaccatccggggaacagccccgtgctaggcaggaaattgcatacacagaggtcagtgaggaccgtccaggggacagcgctacagtgttacgaaggtcagtgaggaacatccaggggacagccctgctctgggcaggaaatcacatacacggaggtcagtgaggaccatccaagggacagccccacggtgggcagaaggcaggtgggcaggcggcaggagaccacaggcatggaggtcagtgaggaccgtccaggggacagccccacgctgggcagggggcaggagatgacactgtggtcatccgaaagctttcgatggtcggcaggactatgaattgaaccagtcagcgggggcttccacaggctgctgagcagtgaggggacatctgagaaggtgtatgtggcacctgtccaagctgattagaacaaggagagtcaggagtgaggaggatgcatggatcatcagggccaggatgacagaggaggaacaggggaagtcagggtcaggacgagggtgtggccgtgactcagcaactgaaagaacacaggagctacccagctccaggggtgtggtgaaggcagcctgtggggagctggagaggagcaggtgcggaagtggctccgctcctgtgggtgtcggggcaacgtgggacgctcggagcaggtgcggaagtggctccgctcctgtgggtgtcggggcaacgtgggacgctcggagcaggtgcggaagtggctctgctcctgtgggtgtcggggcaacgtgggacgctcggagcaggtgcggaagtggctctgctcctgtgggtgtcggggcaacgtgggacgctcggagcaggtgcggaagtggctctgctcctgtgggtgtcggggcaacgtgggacgctcggagcaggtgcggaagtggctccgctcctgtgggtgtcggggcaacgtgggacgctcggagcaggtgcggaagtggctctgctcctgtgggtgtcagggcaacgtgggatgctcaggagggggcctcagcacgcaggaagctgagctcacaaggggtcggattgcaagatctcttcagaggtggaagctgatgcgggtggaggtgggtggtttctaaagataagaaggggaggaagaagatggggactgggaggggagagggagagagagagcagaaggatgagcttctgttgaagagagaggcgccacacacagcctccacgcagcctccacccagcaggcgggaccagtggacaggctgcagctcacagggtccttgctcaaaggcggcagcaaatgcaccatccacttcctttccttgccggcccgtcagtcacagcatcggaagaatgaatagtgctccctgatccctaacgtgcaatcggggctggagccggagacccctccaccctgcagtcagggccagcggggctgtctcaggcagcacatctaaaggcctctccaagccatgcacccaccctgcaggaaagagctcagcatcctggcatcaagtctgccattcaggccacactgggacttggtgtccagtcctcatctcttctttctagaaacccaagttaaagatcaaggtgacacagaaccagagcttagcagccaaaatcagaatagcacagatgcgtagtcaccccaaagcccatctgctttgttccgggatcccccagcctcatttccatctctgtcatgggctctactgacaacacactagcagaagagaccacacgtctgtcagcgcccacaggcaggtggcccaggggagcagggcctgtcctttgcccaggcctgaggccacacgggcagagtggcagtggagggctggcatgcacacagaggatggtgacttgcagtgctctgttccatggccgagagggctgtaagtgatttggtgcatcttagatagtcattccacccggcaagcaccaactcaaggatgttcatggccctcaaatgtacacttgaggccaggctatgaggggagcacgaagatagaggacgagacacaagtcaagccttaaaaagccattctctcggcagagaagaacaggcacacacaaccaagctgcccattccccagagctgctaaggagacagtgttcgcagatcttggatcagtggagacaccctgagagagacacctcagagcctgtactttccagatttcaaggccacacccctaaacctgtttcctggtgtgcggggacacatttagctgggcccggttctatcagggaatatttaacatagtttcaatgttacaacttggcatcctcggcttctccctcttgggttctgggggagccccaatgacagaacaacttagaagcccagggtgctccgaggaaacatttcaccaactcagcccacggcacccacaccaggtgctcatagacagctgctaaagaaatgagtgaattaatgacgctttctcaaattcgcaccccacaaaaacctcattcacactaagtgtgtgtgtttactctctctctctctctctctctctctctctctctcacccagagtccaggctaagaccatctcactctcttcagtttttatcttttccaagatttcatttcttaaaaagattctacccttctttgcatccttttgaactccctcttctattcctaaccctgttctcttttattttcatattgtaatcacaaaataattcacagatatcagaaattctcctatttgataaaaaatactgtaattccatgtaagagaaacagccatgttctttaaaaactgaggaaaagaagagaaagagaaaactatgagtaggtcggatgtgaatgtaaagaataagccgacaggtcggatgtgaatgtaaagaataagccgacaggacactgagggcgttttgcaggatcacattcttctcagggccgcttgctgggaaacgacatgtgtcgagttcccagcagtgggagggctgtcgtcgaggaggcccaaggaatgtaccttcccagcctcccacaggggattcctgccacccatgtgaggtcacatggggttggcaaagaaccttccttgagtaatagaactatcatcaataggtgatttgaatttgtttttctcaagttaaaatattgaaaacagttggtcaggagttgacggcaagaaatgccagatgaaattttctggcacctttgaccctgcacctctgagataagatggcagtgaaacctcctccgtgtctacccttcatgctcttaccttttcctttccctcctcacctcaaaatgtcgagaggcagctggatgcgctggtgtggtcaggatggctacgcaatgctatttgcacttcaagttttaccccctatcctgggtcctgggccaagacctaaagagcagtgtggtttgtgatgttattaagtggatcggacagagactatggaaatgcgaacgtgcacatcacatcaacctgtgcagaacttggaagggagaacccacggctcacagaggggctttttcctcctagttctcctaaaccatccacatcttgtagaacaaagaacaagggtcccaacacgaaaaaggaggccatccacacaggctggtgccatccctcccatacctgtctctgtagacatgctctgtgccttgcttggaaaatggaaacttctccaggcaaccctggccgcacagctttgcctctcacacaatcgcacacatcagcttcacccatgtttccggctaagcgtcatgtccccgcacacccctgggcaccagtgcaagacacggtgggaggcagcatgctcacagctccttgggtacaaacgggttgttctcacagaggccggaaagagccagggttcccacatgcacattgctaagtgaaagcagccagtctgaaaatcctggaaaaggcaaaactatagagacatttaaaagatcagtggttgtcaaggattccgggagaggaagggagatgtgagtatgtgaaatagatgatttttttagggcagtgaggctatttctatgttactgtaactgtggataaatgacatgcatttatcaaagcccactgaacttcacagcacaaagaggagccttaatttatgcaagtttaacaaaaaaaatcaaggatgcttcagatcccgggacagaatgccatgcagacggtgatgacagaatcctgcagcatcacagatgtgtgaagccactgacaccaacggggcaggagaaaaagtgctgacctacatagctctggaaacgagcagagcctgtaaaactgaaaggaaaagatcctgtctataagcactgtgctctagctgataaacttgtttcccaagaggtaccagctagcaattctgactctaccacacatgcatgcaaagtgaacaatgaggttaacagctggcaggtggcaggaggaagttctccctattggagtggaggttacaggtaagcaggaggcagcgtctggaataatccacatggtaagagcctggagttggagacgtgaataagagctcatggttagcttggtatagatacagatggtaacagaaatatttataaatatgtgtatattcctagatctcacagtcacacccacatgcacacactcacacacatgcatagtcacacacacacacacacatcttctcgctccgtcagctgacatgtcctacaggcaaggacatccccgcagtaatgagcacacaccacgcccagcacttgatttccaaaaccattctcagatagaagggactgggactgcttggagaaatggctaattctaagactgagacaggaaatacacaagatgagcctaaagcctcttgtagtgtcagaaaggaaggaagtgttttcaaaaagccataaagatggacgtattcaaagggacagtttgtgtgaggccacggaacgggctgccggcagccgaagctggaacaatgtgagcaaacaaaatgaaaagtgttatgttatagcccaaaatataacataaagtgttgaataaataaatgggaagaaagagacaaatctcctgtgcagaattccaaacaatttctgtctatcctctgccttcaaggaagcagagcatgacgcgtcactcacgagtgtgggtttacactgtgccttccctcagagagtgcagcagggaaagagggaagcggggtgagggggagaagccgcaaccctccccaccaagccactgagcacagttggtatccaccatgatggcgcacactgagtgtgtggctttgatctgatgtgatgagaaggcacttcaccccaatcttcctccccagaactcaaacacatcagacaaatccaggccaggggacattctacagactgaccaggcctcctcaaaactgtcagggtcctcaaagccaaggaaagtctgagaaaatgtgatagccaagaggaccccaggagacacgaccacgaaatgtatggtagaatcctggatgagatcctgggacagagaaacttcattaggtgaaaactaaggaaatctaaataaagtagggaatttagttaacagtcacataacagtcattggttccttaattatgacaaactgtgtactaatgtaggaagttaattgggaaactggatgtgaagatatgagaactctctgttctaccttcagttattttagtaaatctaaaactgtcctgaaaaatagtttattatagacagagagagaaatagccacatggtagaatatatgaagccatcaaaatgctataggttaatacttcttaacacagaaataggtttatgctacattaagttttaaaaaacaagatgtaaatgtggaagatagaaaaggcagccccgaaacttaccagtggtcatttgtgccgggcagcgggaatgttttggcctttgatcttccttttctgcttatctgtgtttcacattttcttcaaggaacatgttaacatctttttaacccattatgaaaaattatacaagttatgggttattcaaagctcagtaaaagccactgatacactaagttgatatttcaaagggtgtgattttgaagccctctcactacaggctttatcaacgcacgatgactgcacaggtctgtcttagctctaaagcacccagcactctgcatcaacaccacgggcatcaaatgaggcggatggaagcctacaaccctcaatcagtaacagcttgctgtttcgtccaggactgacatagaaggattattcagggggccctaatctttctcttctgtctgctgaggatggtcttacctcatcacaggtatacctggtatacctctggctgtttgtggagagcccctgaaaacacagcagtacattctcctcgtttatcaatgaggagggatggccacgaaggggagcggctggagagagggagtgacggagaatgcacagctgcatggagatgaccccaggatggcagcaaagggcattcctcagaatgacgtgggctgcccagtccctgaacaagcatgggcctggcaggggtgttcctcagatgtttgtgatgcaattaaacctctgtggtccatgaaagagaaggatctcagctgtgtccacttagggtgtccctgtgagacacgacacatccctgcaccccaggtgatggcgatgcctcccactggcaaaaaggatccatgtgtgcagcaaccccacctcttcctcagtgctcacgggtgcgtcaaagagaaacaaaagaaggatacctactttccaaacacatcatccatcaacatgcatgcagctgtttactggaatttgctttttcgttacttaagctaatgaggtcatttggaagatatttatgaaaataaaacataagaggatgaacctgccccatccatttggttaacaggaaaacatctcgcagatgtaacagccatggctgacttccagaactgtcaccatccgcctgcctcaaagtcactggcacgtgtgtggtttgctgctcctggacccgctctctcaggggcatcatcatgaggcctctgcagagccagaggaaagaaaatcatctgaagaagaggattccgtgaccactcttattttatctccacagtactgtttcttgcctaatttgtgccgaacatttacgatgacaaagacgatgatccgaaaacagcaggcagaacaaggttgcactatggcgaggagaactgggatgcggagagaaaggggcagccccgggcacacaaagcggccgcgtgcaccagctggtgtttccctctcagtgagtgtattttttttttttttttgaggcagtgtttccctcttgttgcccaggctggagtgcaatggcatgttctctgctcaccgcaacctctgcctcctgggttcaagtgattctcctgcctcagtctcccgagtagctgggattacaggcacgtgccaccatgcctggctaatttttttattttcagtagagatggggtttctccatgttggtcaggctagtctcaaactcccaacctcaggtgatcagcccgcctcagcctcccaaagtgctgggattacaagcgtgagccaccatgcccagccgtgcgaatgtaatttttaaaatccagcatctcaacatcaggaagaactttacagaccagtttcccttctcactcaatttggctgcatcacccactgctcccaatgggaggcgagtcccaggggctttttccacctcattccatgctcgcctttctacatcatctgttacatgctcaaggcttccccatcggcctctgcaatccctcttcccagttccttcctgtttccctactctccatcctcctctcctgattcctttccttggcttgttttcacccacgtgccactgaaataccagcgtctaccaaattttcactatcgacacctcccacgcttcatcctctgtctggtcgtctctccacagccatggctgtagtcaggaatgattcctaaatacgtttccacactttttccaagagttccaccttcatagtccagtctttctggacgttgtaacctctatcacacaaacatttcatacttgatactctaaggctgagccccttttcactgtccccctccccacctaccatgatatccacagacacgctggtgattgcacctcacagaagcctctctgggcttctccccacgccccggccgcctggccatctcttgcctcaaaggcctcctaaggagtctccatagcattaagtaatttaccttccaattcattctcctctctcctacaattaaaagtgaatcattccagccagcgcagtggctcacacacctgtaatcccagggctttggaaggctgaggtggaaggatcacttgagcccaggagttagagaccagcctgggcaacaaagtgagaccctgtttctaaaaaacacataatttaaattttaaaaaataaatgaaaatcctccaataacatgcagcctcttctgtatgaagccaaaacttccttacaaggcacaaaggtgctttccccttgttccttcccatgccctcaactccccagccccctcccagcctgccttgcacccagccctaggcagccacattcttggtgctttctgcctattgttcttggtgctgttcttggtgcttctgcctatagttcttggtgctgttcttggtgctcctgcctattgttcttcgtgctgttcttggtgctcctgcctattgttcctggtgctgttcttggtgctcctgcctattgttcttggtgctgttcttggtgctcctgcctattgttcctggtgctgttcttggtgcttctgccttttgttcctggtgctgttcttggtgcttctgccttttgttcctggtactgttcttggtgctcctgcctattgctcttggtgcttttcttggtgctcttgcctattgttcttggtgccgttcttggtgcttctgcctattgttcttggtgctgttcttggtgcttctgcctattgttcctggtgctgttcttggtgtttctgctattcctgtaacctgcaaggcttttctccacactacaccatggaaagtcctctctagtaaaccgtagcccagcagaaccactcgtgagtcctgtgattccttccaaaccactagacctggggcaccttgggccccagcatggtgcctcactgattttggactgggcacaacacgattcatccaaacaccacttgacaaaggccagcaggacagaacagtacaacgctggttccacagtgtggtcctcactgaagacagggcgggtggcattgacccccattcctgtcccacagttgagggctgccccacaggcttcctcctcacttcgggggtgcaagcctgcaagaccaaacagcccacagccttggaggaggcagagtgcgggcagcgccccctcacagaaccgcagcaacgacacctatcaccgcccaccacaggcgcactgtgggctgatggggtgggccacatatggggaattccagaacgtgaccctgtacctaaatccctgcagttcccaagtctccctcagtccttcccagacatctcttaaggggcctgactctgcctcagccccaccgccccccagcctgagccccgttccacctcctcactggcctcgctgcccctctgcaatctcctccaacagccgccaggatcatctttacaaaatgcaaaggtcatattgctcctgagctgcaatgccctcaggcagtcccctgcctttagggtggagtccaagccagcctcatggacagcgtctccagactcttccccaccatagccaggcaggcctccaggcgcttccagactcatccccaccatagccaggcaggcctccagatgcctccagactcatccccaccacagccaggcaggcctccccaggcacctccatccccttcgtcacacatcccacacaccccggtttgttcccaccaggccttcactaacatgccactgcagaaaaaccttccctcccccccagtctgactagagtccactcatttttcaggtaccaagttgcaccttgcttcctccaagagggctccctaattcctgaccgggcggggcacccctgcaacattctcccagctccctggactctccctggcccagctctcgccaactgcattgtgattacttaagaacttgctcctcccttaaaagaaaatagactccaggagggcaagagtgggtttatctcagttactgccatggtgtctataaaatagttagagcccaatagttcttactgaatcaatctatcaattaattaatagagacgatacggatttcatggggtgggaggatatgaacattaatagagacgatatggatttcacagggtgggagaaggatatgaacattaatagagacgatacggatttcacggggtgggagaaggatatgaacattaatagagatgatacggatttcacggggtgggagaaggatatgaacacacagggacatcagcgcttgtcctttctggacttagcaaaggccatactcagtagctcaggtgccaagtaagccagaagtgaagaaaatgcacagccaagccgggccagaacgtccacagaggctaaaggatacggctcaagctccacctttaaaagagggtaggactgagatcaacagaggatataaacagattaccaggacggcatgaccatagaggaaggacccacttgaggaggccacagcaggacaagagggaaggacgaaccttccccaaggctaagggtcaaacattcgagctgattaaaaatgttacttgaggccaggcgcggtggttcatgcctgtaatcccagcactttgggaggctgaaacaggtgaattgcttgagctcaggagttcaagaccagcctgggcaacatggcgaaaccccgtctctataaaaagtacaaaaattagctgggcatgttgctgggtgcctgtaatcccaggtactcgggaggctgaggcaggagaatcacttgaatctgggaggtggaggttgcagtgagctgagattacgccactgcactccagcctgggtgacaaagcaaaacaactctgtctctaaacaaacaaacaaaaaaacaatacttgggctccaggatgcccatcatcctgcagcagtttgcactgagctccctttatgccaacaggctcaggatccccaaagcactgcagcagagaacagccgtgcagcatctcaggccacacagtacacaggcgtcgtcactgtttccaagaacttccttggctgaaaagtcatttcaaactttggggctattttggcatctaagtgggaagagggagaaaacattaaaagaagtcccttagtgctgacactgtcctgccagccagcacatctcctcattttatgaagtcggactcatcccagctatctgtgtgagacactcagttggccatgacagttaaattactttttcataccgagaacagaattagtctataaataagtaaagaggtgctagggctgagtcagaagtgccgattccacctcaagctccttccctgcccgatctgcaggtggctctcagggcatgggggaccaagctgtgtttgagcctttgctttgcatgggtggctctgaaggtgatggaatgggctggcattctccagcactctctggcattttctgacattctccagcactctcctgcactctccatgttgatctgggtgactctggaccttcattctaaagatactcaagaatctagtggccatacaacatccccaagggagaaaggggccctttttctccaatgctgctgatgctgtttcccatcatataaggactttctcccatcccaagcagccaagggaaagaagtgactcacctcagaaagaagaaaaagggaagaagggttacccaatgcctcccccatggcatggaaattctccattttccccacaacgccagcacggtcacactctgcaagcaacacccatctgttctccttacattttccaactttactatcattagcctgaaaccaagctttcctgttcagtgcaatgactactctgccaaacacacaagttctgaacaggacatgtgccatgggaaacatttcgatttaatgagcttttccagtgcaacacagaatgattttttaaatcccagggatgtcccccactcaaacttgtcatttcttttaacaaaacaacggcaatgccaagaaaggaaagcattttctggccacagagtgggcccttcagctccccttccaagagggagccctgacacggaggcagaaggacttccatcccctaagaaaaacagagtttgggatcttgaacaaggtgcattggcagcctgggtctcacaccgtcccttctagagcaggaaggtgtggaaaggagagtaaaattccactattgtgaaattcccccttcagcaatgaaacggactctgagaacttatttttcctgaaaattattatttatgtccatctagatggtgtttctatgtttactgccactacaatttaaaacagttcatgcccttcggtagacagtttctagacgagtctttcctggatgtttgaagcaggttctccaccttcagctcagctcgaggcccctggagaaacactccccagagcaggatctccagagaaggctcccttccgtcaggagcaacagtggctccaaccccgacttccaagctctgggcggccttccactgttttgtgggtggtgataattccatttaaagtagcacttacatggttttttagaaaagactataactcctggatttttttcaaccatattaccaatagaaacaaacatacgaagaacgatcgggtggctgcttatcagaaaatcctaatccctgcctcagccatgcccagccaggtcacagtgagcacgtcctggtttccatgtctgagcaccagatcggtaaccccagcctcttcactctcatgagggtgcagcaaagattcagcaggaggatacacatggatacgctgggcaaaccacaggcaccctgcaggccatgagggcctggccgagatctcagccagccaaggaacaggagatttcagccacgtccctcttatctctcccacagcaggattccaagtgctgcagccaggaccttattccatgacttccctctgtgcgaggcgctcagtcctgcagacgcagtgacttcctgccccagctggaatgctgtctgcgtagtcatactataattttatttgtattatttttattgttgtattgttattttatatttttttccccagtactttcaatcctctgttggtcgactcaggcagaacctgagggtatgcagggctggctgtattcttgcccaaagggacctgagaaaacatctagaccaacgcacaggactgtgtgattcacccgaaaccacacagttagttgctgagttagagacagtactaggtgtctggcttcccaacagggtgaattatttctggaaattgttttttctccctgcatctaaatttaacaatgaggaaatctattagtaatcagcaagatgctgaagcagtaactccaaaatcagttgacgaatgatttctcaggagcagcacgctgggtgctggctcaggaggaaggtccgcatcggaatggtggactgtccaggtactggctcaggggggaggtccacgtcacaatggtggactgtccaggtagtggctcaggagggaggtccacgtcacaatggtggactgtccaggtgctggctcgggagggaggtccacgtcacaatggtggactgtccaggtagtggctcaggagggaggtccacgtcacaatggtggactgtccgggtagtggctcgggagggaggtccacgtcacaatggtggactgtccaggtgctggctcgggagggaggtccacgtcacaatggtggactgtccgggtagtggctcgggagggaggtccacgtcacaatggtggactgtccaggtactggctcaggagggaggtccacgtcacaatggtggactgtccgggtactggctcgggagggaggtccacgtcacaatggtggactgtccgggtgctggctcgggagggaggtccacgtcacaatggtggactgtccgggtagtggctcaggggggaggtccacgtcacaatggtggactgtccaggtgctggctcaggagggaggtccacgtcacaatggtggactgtccaggtgctggctcaggagggaggtccacgtcacaatggtggactgtccgggtactggctcgggagggaggtccacgtcacaatggtggactgtccaggtagtggctcaggagggaggtccacgtcacaatggtggactgtccaggtgctggctcgggagggaggtccacgtcacaatggtggactgtccgggtagtggctcgggagggaggtccacgtcacaatggtggactgtccaggtgctggctcgggagggaggtccacgtcacaatggtggactgtccaggtgctggctcagggggaaggtccacatcggaatggtagactgtttaggagaaaggtccacgtcagaatggtggactgttttaagaggaaggtccacgtcagaatggactgtccaggatggtgcatgtgcagggtgtgttctggcaccactgtgtgtgtacagcgaatcgctctctgtaacctggcccctggtgaccagatgcacttacaacatgcaccttgctgcggctagatgcagtctgtggacacagattaaggtgaagtgagggcatcagcatggtctggagtccgtgaggcactcggaccaccggagccagcccaggggttggcacagtctgcagggctcagcgtctcccctggttctcacgtggacattggctttccttgtcttgagagcagctcaccatcacgagttcttccaacagcccaagtcttcatttccacacacttgcttctgtgtgtggcagatgtggagctggagagaacagacctgccgtgagaagggagagggcagcaaagatcacccagaacttgctgggactgagatgaacaaaagttacccaaaaatgggaatttcaagaatagccaagggcttcaacagaggatgagctgacacttagatttagggattgtcagcatcaccgtggctgctgacatcttgaaaactggaaaatggggtctcagaagaacaagataagagcgcaggaggccagggtgtgactcttggggtccaggaggggacatcacaggaagcacaagttggaggggccagacgggttgcagccaggttggggtctggggagccccagtgtgaccaggggcgggggtggtgggtgagcctcagcagccagagtggtgcagacacgtcccacggtgagggctggtgcggacaagagattagccaaaggagcagccaccatgctgccgacagcgagtctgccctgaagtggagtctgccctggagtggagtcgtctgccctggagcggagtcatctgccctggagcggagtctgccctgaagcggagtctgccctggagcggagtcgtctgccctggagtggagtcctctgccctggagtggagtcgtctgccctggagtggagtcgtctgccctggagcagagtctgccctggaatggagtcctctgccctggagtggagtcgtctgccctggagtggagtcatctgccctggagcagagtctgccctggagtggagtcatctgccctggagcggagtctgccctggagtggagtcgtctgccctggagcggagtcgtctgccctggagtggagtcgtctgccctggagtggagtctgccctggagtggagtcgtctgccctggagtggagtcgtctaccctggagtggagtctgccctggagtggagtcgtctgccctggagtggagtctgccctggagtggagtcgtctaccctggagtggagtcgtctaccctggagtggagtcgtctaccctggagtggagtctgccctggagtggagtcatctgccctggagcggagtctgccctggtgtggagtcgtctgccctggagtggagtcggccctggagtggagtctgccctggagtggagtcgtctaccctggagtggagtcgtctgccctggagtggagtctgccctggagtggagtcgtctgccctggagtggagtcatctaccctggagtggagtcgtctaccctggagtggagtctgccctggagtggagtcatctgccctggagtggagtctgccctggagtggagtcgtctaccctggagtggagtcgtctaccctggagtggagtcgtctaccctggagtggagtctgccctggagtggagtcatctgccctggagcggagtctgccctggtgtggagtcgtctgccctggagtggagtcggccctggagtggagtctgccctggagtggagtcgtctaccctggagtggagtcatctgccctggagtggagtctgccctggagtggagtcgtctgccctggagcggagtctgccctggagtggagtcgtctaccctggagcggagtctgccctggagcggagtctgccctggagcggagtctgccctggagtggagtcgtctgccctggagtggagtctgccctggagtggagtctgccctggagtggagggaagtgaagccagatcgctgaggagtgcgaggaaagctgttggttgttatggtcaagccccagaactcgtagatggatgtccccagcccagtgcctcagaaggtgactgcgtttggaaatcaggtttttgcaggaaaaattggcgttaaccctcagcatggagtggggattggtcccaggacccccacttacgccaaaatcttcacacactgaagtcctgcagctgccccacggaatctgcatacacaaaaagtcagcttctgtacacttggctttcacagccctcaaatactgcatttttgatccatatttggttggaaagatccatgaataaatgagttcagacccatgttgtcccagggcccactgtagttccgatgaggccactgggggctcctccagcacagccaacaccacctgtgccagcatcactgcccttcgaagtgtggccccagcagcggtctcctgcaccctccgaaaagacagcccttggaagactgtggctcaggatgcaaggctctgactgaaccctcaagctggccctccatgcgaagaaatgctgcgtcccaggccctgcacagtgctggacttcccagctccaggctctggagccggctgcagagcacagcgtgaggcaggccctgaccgctctggaaggaaaagcacctctggcaagtagtccagaggtgaaagtttctctattttggaaactgggcatctgccaaggagaacacacggccccctaatgtgcaacaaaaccgtgagacccgagcagaagctgcagcagaaggtagcacgggcaggatgctaggccccaggggccatgggctacgcacgggccaggtttccagcctgccagccccatccagacttaaggacggaaagtgggaccaaggctgagccgctccgcacccctcgctctacagctggacacaggctctgcagaaatcctgagctggggccaccccagcctccctggcccagaacaggcgctcactgtatctcctcccttcctcctgagaggtcctacgggatggagtattaatagtgccgtgtttaattattattcagcataatcacacatattacggggatttttaaagatcctttcatgcacaatgagtatttatctaatgtgccctcctcattcccaagcagccctcgggggcagatgcccccatctcccaggacatctctgctggtctctctccacggcacctgctccacagccacctctctctgctgtgctcacacagtgtggaagctcccgcttcagcaagaggaaagccccgatgatacagggtgaagacgcctcccctcacagacctcagacctgtcccagagccctgacaggaagacccaagctctcctgaagccttagggtctcaacatcccaagccgacaatgcccccccattgactcggctctctgcagacctgcagacctgcagcccagcccctactctcccctctggctggcattgtgcagtccttccttcctcagcagcgctgtgtgggaagggggactatctgcccagtccctgaggagatgatgacttcctacagcttctgaaagggcccgctctggggggagccacatcaggcagacacacggctcctggtgttggcagggtgccggcggaatccagggcaggattcacttgtgtggcgaaggggtcacccctcgtgcaggctcaggccctccctgcccacctgtggcggcgaagggaactgacaccactccttcccggtgagctcggcagggctgcatctctcccgtgggacgctgcagagataaccaggtagagccacgctcacgagaaccaccagccactctgagctaggacggggcacaggcaaccacgttcccacaaacacagggtctggaggtctctccgctggtcacggcctcggaattccgacatgctggactgtggcttgggaaactgactcggttgttctccattcctgatcccatttcctgtttgtgggtgtgatggctgagttgtgcaccccaaagttcatacactgaagtcctgacccccaggacctcagaatgggactgtatttggagatgggtcttgaaagaggtgatttcagtaaaacgaggtcgccggatgggcccggatccaggctgactgggtccttatggaggaggaggtgaggacacagacacgcacagatggacaaccctgtggggcacagggaggagacggcatctgccagccaaggggagaggcctctgggggaacctgccctgccgtgctctcatcttggactttcggcctccaggactcagaaatgtctgttgtttgctaagccgcctggtttgtgggggtttgttagggagactgagccaattcatacagtggattccgccactttctttctaacacaatgaagatagagttggtgacctcctcaaaccttcataaaggcataacttgtaacaacacaagttatggtttgtgacaaatatcaccagaagccccaagcagagtcgagacgtgcgcagaaactgcacaagccaacctggctcaggcctgggagagcatccctccgaggagcatccctccgaggatcccccacagccttcccgtcctcggagcaaatgcagctgtgtccttcccgcaccgtgggcctggccctcacctccccccaccccacacccagcttctccaccagctccccaggcctcctccccacaaggcgcgtcctgggcctccctgaccccggccatgccccccgccaccggagccacttcactgccttccctggccacagctccctgaagacagggccagcctgcgtctccgtgtccagtccttggacgtgctaaatcctcagcgagtgtctgccaagacacatgtgatgagcaggtgaaggaacatgtctgacctcctgcttcagtgccatggaggcctcaccagccccaggccatgggctggcctctccatttcctccttctgagaataccgtggagttgggattgtgtttgcctgtttacagggactacggtcagtgtccctcccaggccgctggtccttcctaacacctggcggcccactgctcagccatgtgggggttgtgcacagggcagggctccgaggtgtgggctccactctgtgggggggtctcacagcagccacacagagctggccattccctcaccgtgacctctgcagagagtagaattgtctgtgtacatggggctggggccaggctgtcctccgccagctctcaccccaggctcccctggtcttcctgccccgtatcccagattcatcagcaccagccacatctcacctgccccacaagctgcgcctcggtgctgctgtctcaaccaccttcctgtgtagcagggaccacctacctgtgttgcttgtgctatgtctgttggtttaaagcccatctctgatcccgcccgacacacagcagggactcagcaggacactcagtctaaacgacagggtagggggcaggcagggacagccgaggagctgctcctgggtgttcctgtgttgtgtgagcacatggaggaagttggtgtgtactaagcagtgaagctgctagcaactggctgtgtaacagctgccaagtaacacatcatgtttccacagagctccagaggcatcagcctaaacaagaggctcccgagaaggtgcactcatacagtgtggtgggggtacccgtgcttgggtgcaggacaggcgggggcacccgcctgggcagcctccagatgctgctgaggtttgccatggggtatgaacgccaggtgacgtcccaaaacaggccactcaatcactccccagagccggtcagccgtctcttgccctgtgaaatgcacatttacaaagcgtcacctggtgtatcaggaacaggttcacttgctgtctcagacctgtgaatgcctacatttcagctgatttagaaccacgcatgctgggccaggctcggtggctcacacctgtaatcccagcactttgggaggctgagggggacggatcaagaggtcaggagattgagaccatcctggctaacacggtgaaaccccgtctctactaaaaatacaaaaaaaaaaaaaattagccaggtgtggtggcgggtgcctgtacttccagctactcgggaggctgaggcaggagagtggcatgaacatgggaggcggagcttccagtaagccgagatcacaccactgcactgcactccagcctgggcaacagagcaaaactccgtctcaaaaacggaaaaaaaaaaaaaaagaactgtgcacgatggacactggcctcggtgagtccacaacaggaagcaaacaaggattaaagtgcccggaattggaagacacaacatttcctacacagcctgagtctaaggtgatgaggggtggaaacaccagctcctcagggggccagccctgtgagggaaacgtgtgctcacgaaagtcagcctggccttcgagcccaccaaggggctttgggatcacacagccaggggcaaatctcagctctgcagcctgagaaaagtcacccaaatgcctcaatccccttctcagacaggcagacagacaataataacaatgatgcctgggacacaggacattagaatgcccgcagcactcacacagcacctggtgggcactaagcacccgtcgctgttggtcctggggctaacgctgatgggaggagcagctgcgtgcatatttacttctgaatattttcacattttaaaatcatctccattttgctttggaatgcgtggcatctctgctgtgcaggtgctgacacgccccagagcaagcattggctgtgtcggcagaggaaggtgggaaggcccaggggaggccagcaggaggacggactcaccaggacacccccaaggacagggaaggtgctgctgaccacggccagcaacgacgagccatggtgacagctcacacacagctgcaaactcacatcgctgcctctggaaccacagagtgctctgtattagatattttgtgcatttttgaccaaaatgagtcaaatgtggggagagtggcaactgtgtgagtctgggctccaatcagcagcgaagatgcagtgtgggaatgacagcagcttccctctgcggacacagcacacactcaccacacctgggctgtgtccaccagccccaggggctgtggggaggggcggtcaccagaaggggccaggcgggagcaggaccagctcacagtctccccaggcctccccagccagcatgagttctcagcatctcctctacacacatggacaaacaccacacacacgtgtacatcacacatgccacacaccacacatatgcacaccacacacgtgccacacacagcacacatatgcacgctaccacacacatgcacacatgtatctcacataccacacacaagcatgcacgccacacatgccatacacaccacacgcatgccacatgcacacccctaacttaaggcctagctccaagtttctgtcacaaccaagagggaaaacagagagaatgcaaaagaagtgagatccattcctaggacaggctgaccccaaaaataagtagaattacgtcagatatttagaacatggaattagtgatttggttccctggctagtccatcaaagcctgtcgatccaaaatacaatttaaatgccacatgcttgcaataaaaagcaatggaaagcaaggtctttacagtaataattaagtgaagcaatgaaattgaatccaaaattattttttgtttctcttcaatactgatgctggtacatgaggaaaacagaacaagcataattggactgaatgagggaaggtggcaatttgcggaggctctgcaggagctcctgggaatgctggggacctggacatcccacgccggcctccccgtgtgccacagactcagctctgctccctggagcaggtttcatgcactgggacagggagctctggtaccccacgacttaaacacatagagcaaggcggggggggttccatgtgggcaaggtgaagagaaagcccacgatggaaccagctacagcacacgtgtgagagcgtgtgcctgtgagcacccatgtgtgcatatatgtgtgcccatgtgaggtgtatgtgtgcaggtttacactaacatatgaaacagagtgagtgctggggttgcaaagacccagaccacaaagagctggtggcaaaggaaaagaaacatgcacactcccaagatctgtttcacagcagaacccactccttcctgctcctgaggggcgaggcaagaggtgtcgggccatgtgggtcccatgcaggttccaggaaggacgttcactcagcagagcaggggaatggcaggctggggggagctagtgatcaagtgccctcaaaacatacacgtgtgtgtgtgtaagcatgtgtacggatgtatctgtatgcggatgtgtgtggccacatgtatgtatatgagcatgtgcatgggggtgtgtgtgtgaacatgtgcatgggcgtgggtgagcatgtgcacacaaacaaaaacaaaccacaacagactgtgttcaaagcgagaggatccctaagctgcgatgagggaactgaatttaatgtcctaggttacagcccggccaacagctgccccaaaccatgcctgacacagcaaatttacagacacatcaccctacagcgctcaggtaacggcttcccagccacgccccattacccacgtcccatgctgccatccaagaaacgctccagggaagggaagccaaggctgtcagttcacatctccctctccagagtcgagctcaagcccgcggctgccaccctccatgaactgatggggaagggggccacaggaaggccccaaccccatccagatccaggcctgcgagcccaggggtggcacagaaacagcaggtgttccctgagagaacgacccagggctgtggcaaagccccctccaggctcagctcatcccacctgtggggaaggcaccatgaggcctcctcacgaggcagacgggtgtttgctgtggtggacagatgcccacatctcacgcgcagcctcctggaaggcagcagatgcaaacaccccagctgagaggaggaggctgaagcaagtgcaggaaagaacaaaaccaatgcaccactggaccatcacctttagagaaaaaggttaagaaatctgtatcacataaaacaacctccaaacaccaggctcgacgccctcacccaccacctgccctctgctcatagaaagaacgtggtgaacaggagcatattttacacaaacacatgcctcctcccagccacgctggctccaacctactaggcacctggaagctgaacgcatcactgcactcacacgtgcctaaacacttaggtgcgccgagaagcccaggcatttggggtttccactgacaaggacacggaaggcaaaaaacccaaagcaacgtgggtccttccctctgaagggtcagataaaccggcttattttattcttagaataggtttttgccacagtgaaaactgaataaacaacaaagtcagaaaggggcgtgtccatccacagactttaatcctgcattaacagaggctccctaaagaagggggtgccggagggaggtgcagaccgcttcagggttggcccagcacctgggtggtgcccatgcccccagtgtaaaaagatcctcagctcgtcgggcacgaccttgctttgttatctgctcttggcctctgtccattctcaagccacgtcacgtctctatgaccaggctcttagatgcccaaaagcgacattgggagaggaaactgtcagcccccagcgtggctcctgtggcttctgagaagccccagatgtcaaacaggcatcagagcattccagtcacgtgccccacagagtcatcacggagacagcagagacagccatgagatttgctcagactttcagcaaacccccaccgatgcctccacactggaagttggagcgtggtggaccgtgcgttataataaagttgctattgtatgtgactttgatcctacaaagaggaaaaaacatgggtaaaaagtaagaaaagaccaaaaacgtcactaaacttcaaaaacccgggacatgatgtgattagaggaacagcatggaacatggcaaaaaatacataacaaaacaacaaaaaccagcaacaggcgcttcctccagacacaccacggcacacttcaacctgttccttacaagactacattgagcgtgctggtgttaaatgcgtgcaggcttccgtgcaggagccctctgcacatggcagagagaatgtggcccgtgctgcactctgacgcgcagaccatcttgatggctcagggacggccaggctccaccacacctgctccctcctgactggcctctctctaccaagccagggacaaggcctcatccccagaaccaccaaaggattaacttaaagcaaaacaaacacaagcaaacagaacagaaatgacttgggttcctgtcactttgtgctcccaagccattccaagagaccagcaattaataactcgcaaagaattagctcacctccaacaaccacgggagcttgaaaaccacttccttccctagttttgttacttgcagaatgaactgattctcaaatccctggagatactgggctgagtgcatttgtcctaattacagcaacatcatcttcctcagtgcaccctcgctcacagggcagcgcccaagatctgcactcaccaaagtgagcctctcacagatggaatctgtgcaaactttaagtcccaacaaaactttgccaaactcacttgttgagcaagaagctcagaaatggagatttctaggaccctccgcatctggctgcaaatcccagacacaaaccatccaaggagatcgcacctttgccttccactgagtggcccaacgtggagtgctaggaagccatcaggagccagacagacctatgtccactcccggaggcaccgccaggaccctgtcctgcgtgatgggtctccctgcaacacacgaggagtccctatcccaggggccagaggggacgtcccgcagagaccgtcctgaccccagccctctgcattgcaccaggtggacaccacagaagctctagcctgaggcaccgagccgtcaatcttccatcaatcgatgaagctctcacctataacggacatcctttcgccaccacacagcatttaccaagctttccagggtgccctgatggacatgctcacaatgcctcggggatttcctctgaagatgtggatgcagaatgaacaccatgaaaacacagctcccactccgggtacatcccaaagtcgcacgtcaggccctccgtgccgccgtcacagctgctctctccccagccaccactgcctttgctggggatgccttgcctgaagatgcaggggctaccctccctgggcctccactggccagtgcaggttgtgaccacccaccccccgggctccatcagggatggctgtgggtgcaggttgtggccacccatgccccgggctccatcagggatggctgtgggtgcaggttgtgaccacccacgccctgggctccgtcagggatggctgtgggtgcaggttgtgaccacccacaccccgggctccgtcagggatggctgtgggtgcaggttgtgaccacccaccccccgggctccatcagggatggctgtgggtgcaggttgtgaccacccacgccccgggctccgtcagggatggctgtgggtgcaggttgtgaccacccacgccccgggctccgtcagggatggctgtgggtgcaggttgtggccacccacgccctgggctccgtcagggatggctgtgggtgcaggttgtgaccacccatgccctgggctctgtcagggatggctgtgggtgcaggttgtgaccacccatgccacaggcttcatcagggacagctgtgtgctgctcttcatttcccaaacgcagtgggatcaggcctggctggatgtctgaactgcgactctgccccaactgctgccctcattgccgtaccccaagagcctccatccatcttgcaatggagctgccactcagcttgtccaccacagtccctcctgaagacacatctctgcgaagctccccccatcacccaggccaaagctagcctaccacgtcacacagtggccatctgcccgggcatgtttcacctcggctgtgcagaccctctgaagacgagacattctccatatgtttcttggctccaggcagctcatcgacagataacatcctgctagatcagcagagacgacgcctgcacgttgggcagcctgcacagccagggagggcggggtgggaaacgcagcgggagacagtgaggtgggggtctggaagtcctgcctcgagcctcgtcagcaggcaggcgtttcagtgttccccagaactacacctcagtatgccctcgcagaaaggagcacttcacacaacatctttagagaccagccacctccaaagcctctgttcctcctgcattgcctcccaaatgatctcccagcctgggaatgtcagattctcagattccatggggtattcttttctgtggctgttactcatgtaatctaaggaagtgttgaagttctgagttaccctgtagcaaaggcatatcttgttccttccacaatctggtcgaagaaaacagcagctttgatctcagatactcttaactactcagtaccaagggaagttgtgggctttgagccaaccacacctaatgtcaatgctcactccctccccattcagctgcgtgaattcgggtaagtttcttacatgagctgagccttgtttttcctttctgtaaattggggatttaaaatgcccacctcactgggtcatggtaagaacctgcaatgggagggtacctgcatttaatctgtgctgttttcgttctcctgatacagaactgtgtcagaatcctgctttctgcggctggactatttgtcaactgcctgttagagcacctggggagcggctggggctttctctggggtcagaccatggcactgaggacttcttgtagcattcaggtggctattgaaatcatacaaaaacaattaataggcaaccattagaaattaggcaataaagttttttcagttagttggtcaactgtgtacacaacacaaagcagaatacagagtgtgtatatgtcctcaaccatgattgtttttacataaagtgtttaaaaaaaaagactggaaggaaacacagtaaatcttaatatagcggctatacttgattatatttgggattttttctttcattttctataaaatgtctaagttttccatccagtttatttttaaaatctgcaaaagtacttcaaaaatgagtaatctaaaagtctggttccatactagataagatgaagaaaaataaaatttcagttcacatccaaaaggttgggaccttactaaccagaaccccacacataaccacacaaaacactcaaaacaaccacacaaagcaaccacaactccagcccataccttccatttagttttgttgtggatgttggcgatgcaatgccccaaatctcattaagcccatcaattaaaattcaaaaatataaaacatgaaaactaaaataaagaaggtctgaaatgccctttaaattttgctgaaaatcatcacctcctcctctgggtccagacagggctagacagaggcttgcctaatgaaagtgattgtcttagatttgaaactttgcctggtttcataaacttgatgatgttttcaagaaaataaacaataagaagttaagtaagtgctgccctgccttgtctattgtgcaccaggcacacatgaagacacaagggccttcccagcccactataacccagatgggactcaggaagaccccacaagggcctttccagcccgccattgacaagatgagactcaggaagacacaagggccttcccagcccaccatcaacaagacgggactcaggaagacacaaggaccctcccagcccaccatcaccgagacgggactcaggaaaacacaagggccttcccaggcagccatcaccaggatgtgactcaggaagacacaagggccttcccagcccaccattgacaaaacaagactcaggaagacacaagggccttcccagcccaccattgacgagatgagactcaggaagacacaagggccttcccagtccaccatcgacaagacgagactcaggaagacacaatgaccttcccagcctgccatcactgagacaagactcaggaagacacaagggccttcccagcccaccatcaataagacgggactcaggaaaacaactgagcaaacatctgtcagtaggacacgggtggagacagactgtgccccggactgaatgtgtgagtcctcccaaaactcctacgtgatggtgttaggagggccctctgggacatgactgggccatcagggtggagcctcaggatgggattagtgcccttataggaagagactcaggagcccaccctctgctcgcccctgtgaggtcccagtgagaagacaggcctctgcaaaccagaagcaggcgctcccagacaccaagtctgctggcaccttgaccccacacttccagcctccagaaatgtgaaaaataaacatccattgtttaagcccgaggctgcagcatatttgttatagcatcctgagcggactatgatgaatagcatagccaaattaggataactggagagggatggcttacaagggcaagggtcaggcataaggaaccacaggaagaggctctctagttcagcagtaatgtcgtcgttagcacccaaggcccaaacgaggaagcagagtcatgcatgagagtcaactgtcaggaaacagtgagctgcagcccaaggacaggccagcgggggctgtcgccagggaggaagtgcagtccacatgccgtctctatccaagctccagctccctctgccattctcctgcctcagaacagggaaaaggtgctctgaagctgcgctcccttccactcagccagagaagaccagcagaccaggggccagaggcaggtgagtcaggacagaggtcaaaggacccacagacctgtgggacacagagcaggacgtggagggtgggcaccccgcagagcacccggcctcatctgccagcccagcaacgagcctggactgtgctgcaaactcgattccttgcatataaatgtgaacattaggctaaatgacccttacattaccagtttatctcaccagcgctttcagcctatttcttatttaggtctctgataaatgacttcatctttatttatgaatgttcctttccctgtaatatttgctagcttcaccttgacctcataaatgtaatttgttgtttcaaattctagtagcagaactgcattttaaaatgctgaaaagccatcactttagagctggtgagagaaaacattactttttttcattactcatttcttctagatttggaagcaaaatctggctttccaagcacggaaggagtagaccaccacagggacagagggtccccctgtggagctctcttccggacgctggcggaaaagagcacagctcgtgcacctttagaatcagtgcccctttttaggggccccctgtaagtggctttgtttctggaaaatgtggggacacttttcatactcgacgtagcccacagccaggtctgtgcaccgcatctcggaaagtgtttcgagacctgctcgtccggtgactggcgcacgctgcgctccctcacaaacactaaccccagtggttctcctcccagcactgcccctcacccctgcgcggcgtgtccctctgggaatccactcgcaggcgacctccagcgtgtgtctacttgctgcttctgtccctgttaccaccaaggctatggctgcaagtttccaaggaaaaagcgcagcctccgtgggtcgtgatttctgtggcttctataatgcgtgtgtgcctctcccagccgtcacacatggcgtctcaagtgccccagcccacccatgggacctgcagagacgcatcccagcgccctaggcactgagaataggtgggcgctcacctgacagtggcctcccatcctccactgccttgagccctttcccatgcactgcactacggacaccccagccactacctcatcccaaaagcaggcggcaccacggggcgggaagaggaactcaggtccgtgaacacctgcctcgtgcagggccctgactccagtgattctcgcagcctcgtaaccccaacaacaggccccggagctcagctttttattcccacttcacagatgagggaacgaagacacgacccacccaaactcacaggtgggcagggggtggtctgactcccagcccagtcccaggacctgctggaagtgaggcagcacgaaccccccagggctcagctctccaaatccaaaatggaggggtttcccttcacccctcagcgctctggagggaacgacaactgcagattccaaggtgtttcagggaaaagccatgccccccgtgtcagccagcacagcctgcaacgaccacactggtaacaaacaagtaactgtcccattttccctgaactatgtcttcaatttcatctaaaaatggaactatgaattccaatgagtcagagaatcttttaaaatgtatatttaaatgcactaagatattgagttgctatatatcacattcaccctctaggcacctgaagacacaagtgacagcaatattggctgtgtgcatttcattaaataggtttacccccaaaactgtccacttgccttttaaacatccttagggttgctgccttcaaaaacaagccttttgtttccacagagaaatgcatgcaagtggctcctccctgcaaatcagaacatctgaccctggcccagcaccggactcctgtcctggatgtggtctcaacagcacagccttggagcaaacccagggagctcgaatgagtgacggtcctggtgtgggttcagccataacctccaggacagatgagagcaggcacttctaaagggtggcccttccgagagggaaaggcctggagccttacgctggagcatgctcactctgggggtctagcgccgagtcccgggtcctgagggacacactgtgagcctggagttggtgacggctggggacatactgtgagcctggagctgatgacagctggaaccggacggtgcactgtgagcctggagctggtgacggctggggacatactgtgagcctggagctggtggctgctggagacatactgtgagcctggagctggtgacggctggaaccagacattgcactgtgagcctgcagctggtgacagctggggacatactgtgagcctggacctggtgacggctggaaccggacggtgcactgtgaacctggagctgatgacagctggggacatactgtgagcctggagctggtgacggctggggacatacggtgagcctggagctgggactggctgggacaggctggtgctgtgtggtctggtcagtgtccccacgtggctgctgcagcgggtgcctgagtggcctttgcagtcacacacaggcagggaccgggtcccatgccctggctagccaagggcctcactctgcatttcctcatggttcttgtctctgcagccgggggctcccaggagcctcgggcccaccaaggcatcaccctccctttttactccaagcgtattagggtctcctgcccagaagtcactgtcaatgcccttaacaaaaagggctgtcagcccctccctcgggccagaggagccctggagagctaaggttcctggggctgcacaagctcagcccccagcctctggggctccatggctgggcccagctagagagtctataaatgtggaggtgacgtgctgggtctcggggggcaatgaggagcccaggctgggccccccacctgtgctccatgggaggaaagcacatggccaagggggggtttctttggaggtggctctgctcccacccatgcccccaacacgcgtaccctccaaagggacagcagagcgtcaccaccccacatccagacgagaccacaagggaccctggggcttcgggcaggggtggggtcgccccagggcccaccgtgtgtgtctgcatggaggaagctctaacacctcccaccgccaaggtctcttctgcccttaaaattccatgagcttttccttcagtgtggaagaaccaacaagttctcggggcctccatcgacctgtggggttagcacttcggtttggctttctccattaggtcaccaaggccaatgtgccccagtggctggtaacaacgtgtgccacgtgtccagtatttaccgagcgccaagcacacaggtgctgcccacaagttaccttctttaatccctactaccacctgcaggataggaatccacttttttgcagacgggcagctgaggctcggagaggttaagtgagctgctcagggctgcacaggtgctaattggcaatgctgggatttgaatccaggtctattctgaagcctatggcctttctatttgccacaaatcatctaagtattcataaacactagtgtgcctggcacctcataaatcggtgcttctcatgtttgtcttgaagacatagggtaaattttttgctgtaaatttcaaagggacattcaaattctttggtttctctagggctttgatcatcagcacgtgcttggaactgtcactcagaactctgggctgtggtggcatttagtgcactgagttttgacctgtcctgagccctacaaacctaacttgttgttttctaaaattaaggccaaaatgccagcaaagcaagcattattccacccggttacctgcccacatctgcaccagacactgccaccgagggtccactggctccgtcctctccctcgtctgtggacctgaaacaaacatcacttccaccctgggcaaggtgtggctcacacagaacatcttcatagtaggaaagctggcttcggttctcagcagtgaatattcagattccacagccatctggctgtcatttcacaagctctttgcaaaatctggctataattctaccaaggtacgaacgttagttaatctgttgaagacttagctaagtgaactaaagaaaattaaaacacttgcttaaagcttgccgcagctcagaacccaaaagggctgcggacgcataaaaggggaagtatcagaggagaaggggccaaggccgctggggaagctgagagactgcagagcaccacgcatgcgcatcacacctgcttccaattcagggagctcagaactggctagcatgaggcttgttaagtctgttcatgaagtaaactggcctagctcacttcagaaaacagcaaggctttattacaaccatgaattaacagactgccaattgatatgctaattactaacatttctatatatttgtcaaataagatccctaaggaagaagagacaatgtgactatctggcttgagttacagtctttaacaaaataaaaccatgagttttctagatttttcattaattcaaaccagccccttctttttttgttgttgttgttttgtgttttttgtttgagatggagtcttgctctgtcacccagcctggagtgcagtggtgcaatctcggctcactgcaacttccgcctcccaggttcaagcaattcccctgcctcagcctcctgagtacatgggattacaggcgcacgccaccatgcccagctaatttttttgtatttttagtagagttggggtttcaccatgttggccaggctggtctcgaacttctaacctcaggcaatccgcccacctcggcctcccaaagtgatgggattacgggcgtgagccacggtgcctggcctttttaaattgatttcctactcttactgggacataagaaagctatgcaaaattcttcagtgcatcagttatgggaaagaaggaaccaaagcgcagaagggatgtgcccagcgccatttttaaatgtagctgaagaggctgcagcagcgtccatccctctcccagcggagcaacgctcaacccaagcaagtgagctccctctctgtcaaaaactctgcaagcaattttttcctctccttctaatattaaattgtttctgagtttgtcaaatactcacaagggaagttttctacgacattgatgtgggtcaacagcaagtccatgtccctgggttctgtttgcagaggaggattcctttcccatctgtcagggcaatgctgtggaattccaaagcccactgtctacggaacagccagcccattactggacatcaaaatgcctggacttctgagctccaaagggcatcaggagatgggggagccgcagagaccacaaagccccagctctcagctcccacgtcctcaccgcaccccaaagacagggaatgtcatgcgccgggttgggtcagaataaggaaaggttagaaactcttattttcaaaatagtctagccacagttttcttaatgaatgcctttatcagatttcatttgaagaaaaggtcttctgctttaaaaaggctgctcttgttcagtccattcgcttttcaaacaacaaaactgaggcccaaagaaatgaggatgtggctgcagacagcacccccgagcacggagctcaccttagtgggttcaatacgccagacacacctgcctccaaccctccccaccccgaggctctgaaggtgggtgggaagaaggaaggcccggagggaagccgccatcagctcagccacccacaacggccgccccgccggctgttcccagcagggctgtgcccctctagtccttggatggattttgcagagccttctaggaggcctgtctgccacacacgtagctcaattcagttttgcactttgttttccttcttgtggtaactaaaaacactctggcatgtaattcaaaaacagcattgagggtaactgcataatgtaaaaaaactgttaccaagatggcagaacatttgaaattatatttgcactttgggacatacagataaaaatgtgatcttatgttaagtgctgcattttccaaaaccacgttaaatttatgtgtgaggcctcgttgaacatgtagtaagtggatgttcttaaaattggctaattccatgtcaaggtttcatcagacatttcatctaccctctaaaattagtttgtcaaaatacacacacagttgagtcaatctctttcctcacaaaaatctactgagaccggatcttgtctgggtctcggagcccaggacaaggaaaggggtcagcctcccggctaagctgcctctgcaccaggctgcccctgcccacaaggcaaccctcaagaagcagctccgcactgtgggtggactgagccactgggcattcctccctccaaagggtccaaaaaccagggcagccccaactggccgggaaagctcctctgggctctgcccctctgcacggcaccagagttgtgcaaggaagcagaggaggcggtgagtgccccacgctcaggagtgcacccggtggagggggatatgtacacccgcctgggaggggccagaacccagtccacactctgcccgcatgatctgcctctccccaaaacagactatcattacccggtgtgactgggccaatgaacccaaaaacaggaacggcaacgttgactctaaagcaagcgtatccagcccacaggccacggcccacgagatggctctgaatgtggcccaacacaaattcataaactttcttaaaacattatgagattttttggccgggtgcggtggctcatgcctgtaatcccagcactttgggaggccaaggcggatggatcacttgaggtcaggagtttgagaccagcctggccaacatagtgaaaccctgtctctaataaaaatacaaaaaaattagcctggtgtggtggcacatgcctgtaatcacagctacttgggatgctgaagcaggagaatcacttgaacctgggacgtggaggttgcagtgagccaagatcgcaccattgtactccagcctgggcaacaagaaccaaactctgtctcaaaaaaaaaaaaaattatgagatttttttgcaattttttaaagctcataagctatcactgtgtgagtgtattttacgtgtggtccaagataattcttattccagtgtaacccggggataccaaaagattgggtgcccctgctctagagtgaacacagaagcactgtctggggcacctgttgtcctggggttcaaagccgctgccaccttcttcccttgcagttttctgctaacacttacacctgcccacactggtgctcacactcacgtgatcacacccactctttcttcttgtggaaagccccacgtggagcagaggggcatctggagctcctgcccagaaatgggaaggtgatctgcatcctcccaggccccctctggaagctccaggtccttcctgactccagcccagccccacccacggcgaggaaggcacctgctcggacacacctgggagctggctctcacttccagcctcaacatccaccgggtttttctggacttagctggctttcactgattttttcttttttgctaaaaggaactagaagatataaaacctcagagcctctatccacccagtcttcatctgagaaaagcacaaataacagattctttcagtttgcctgtgtctctcaccactaagctgtaagaagctccctccaaatgagaacgtcacacatgcagggaccagtcctgtgctgcagaccgacgcagtgggaggccacatgcgttcctcagcagctgcaaatacctgtttcttattcctgttaccattttctcgtattctcaagtagaactgtccctacatttcctttccttttctgcacccttccaggatggatgtgggtcacttttccaccctgagcagccgtctgcgggcctcagggtttgcgctattctggaatatcgttggtggggctgttcacaccccgctccgtgtggctgatgaggagctgagggccactagtcttgtcttggtgaaatcacagagcaagtgaccagcacattctctgaggctctggagttgctgtcacccccagcaatcctgtccctgtttccttcaaaatttcaaatcttgccaggcccagtggctcacacctgtaatcccagcattttgggagactgaggtgggcggatcacctgaggtcaggagttcaagaccggtctggccaacacggcaaaaccctgtctctactcaaaatacaaaaattagctgggtgcggtggcacgcgcctgtagtcccagctactcaggaggctgaagcaagaggatcgcttgaacctgggagacagaggttgcagtgagccgaaattacgccactgcattccagcctgggtgtctcaaaaaaaagaaagaaagaaagaaaaattcaaatcttaattacaggactttcaaaattccaggaggtaatttacctccagcaagggctggagaccaaaaaaactgggccaacggcccacaaacacgtgagccaggtgaagggtcatgcagaaaagcaggactgggtgtgagcatgaggacaggaagggggaaggggctggacacggcctgtctcctccctgagaggaaccatcagggagcctcggtatcagcatcacactcctggtgacagggacagagacggctccttccactggatgtacagagcgcttccagcagcttgagcttcacgcctgcccggagacggggtccgcgaggtgccagctttgcactgtcaaagggaatccctcccaggggaggacggactgagctctcagagtcctttgggcaccacagcccggaatggtgctggaatcacagccgccgggttaaggggctcatggcggaggcaagccccagtgtcccaggcgccatgatgtctaagtgactatagggccatgaagaaggggcctcctgataatccctaccagcagccaggaagcaccctgggaagcccatcgcctgttgccctcccaggccacaccttgacgtgggaggccacgggacagacgccacctctcccgagtagcaggtgggtgactacagaggtgctctgagggtcttaggcagagctggccatgcttgccttggtgaagaccccagccaccagcctgggaggcccggtcaccccacggccagcgcctgccaagttcttgtgagttgagcacgtctcacgtatgcaccaacatgcagatgcacacacagggcatgggcactccagaggggctcagcttatggttaacgctggggctgccttcatctcacgcatgctgggcagcctgggcacctggggcagggctgggggacagcccagccatcttcagggccccaggtgaggccacagccagcccatgcagagctcagagctcacggcagagcggcacagaaagaagctcagacccaggccctcctgccaggcaaggcccccggactcactcaccccacaccaccgatgtcaggggttctgtgcaggcaaagtggccttctctttgtattgattttgggggctttgttttttttaactaaacttttttttaactgtggtaagatgcacataacataaataaaatttactatcttatcagttttaatatacaattctgtggcattcattacattcactactatacaaccaccactgccatctgtctctcaaactcctttcattttgcaaaattgaacttcattccctgtaaatgctgactccccagcccctggcacccccaatcctatgctgactccccagcccctggcacccccaatcctacgttgactccccagcccccggcaacaccaatcctactttctgtcgctgactctgacaacactaggggctgctataagtaggatctcacagtgcttgtccttccgtgtctggcttattccattccatataatgttctcaaggcgcacccatgctgtcgcagaggtcagggctctttgcgtctatttttaaataaaacaccagctctggcttcaagggaaaggggcctgttggaggacggaagaggcagggaccctgctggtggagactggagccctgggaggcactcctgggtcttccagtgggtccagcagaggctgattcatgctagaaacaagggactttccatgcagggtccaggaatgcctcatcagccccccaccgtaccccctgtccacctggcctttgaggctgaaacactgcactcaagagcactactctgtcccaatatcaaggcaacgcttctcaaggacatgggctggcccgagtatcagtttgcagcaaaaactgtgaagattaatcaaaagccacctcccccagggaagctgtgactcccaggcacgaccttgcccatgggggtcacccactccgacccacaggggtggccgaggacctggatcccggggctgtgccatccctgcctccaggccagacatccagcaggtttcccaggaatctgcacacaagatgcagcaccctcggctcagactcaaagcggccagcaggagcaggcgacatccactctgcattgtccatgctctcctcatgtggatgaggagcaggaccagcactggaggagatcaggatcctgtcacaatgtaaggtcatctgtgcctagtggatcagacgctgtgaagaggagtgtgtgcaaacctcactgctctgaacggccctgatccaagagcagccggccccgattgtctttggttaccaggaaatgttagcagatgcagtccatgcactgccaccgaggtcactggtgttccttttctctttcaaggcattggtcaaactgagtgccttccagcatcttccccagagagcaccacccacaagggtgcacatgggctctgccatgctcccgttcctacctgccactccaccgagctccgcccgctcttggtgacccctcagcgatgaccagggggctcttcctacaccaaagcctctggctgcaagcacatttcttcatgactttctctttcttaaaaatgagtgtaaattttgcactcttctttgtaacatatgcctgtgtgccttttatgataaaggtgttttcttccttttcatcagatacactggatgctccaagaacaacacgggttctccgtgtgacttcacactcccccagcatgactctaagcccagtgtgggaccagcgtgaacccaggcggcctctagaggggaggcaggagccgccctgaccaccaaagccagcgcaggagggggctctacaggatgatgtgttgagtgggcacaactccacaaaggagaggaaccgcagtccgtgccaacagcctttcccaggaaagaccttccgggacctgccacccatctcctccttggcaagaccaccccagcccaggcacggccaacgcccggcccccgcttgagttggccttgagctccctccaaagaggagatgcagacagcagtgccaccccaggggggccgagggagcaggactgagaagctggttttccacaggttcttgtcatccaaggcgagcacaagcgggaaagaatggggctggaatgttgggagagaagggagtgtgtgatcagcattgtctgcataaatgattcaggctttttttaatgaaagaatcttatttttgaaactgaagttgacataaaagctcccgaagtgaatcagacggtggtggcttctccccaccatccactcggcaggggacagggtctccacggggagctggtcaccccacgtggacgccgtgccctgcctcctctggcgagctttgtgttcaccgggcggattctggcagacaccggtcccccagttgttgcagcgagactcagacccaacccctgaaccccagggatggcgcctcactgagtccattggatccgcgaagggcaaaggggcagccgtgaataggtaaaattcccgtaagctacggaggttctgctggctttgtcttctcctttgcaaaagcaaagtcctgcggaggctgggcttcgcctgagcgctcgctagggtggaggaagcagctgtgggcctgcagccagggctcgctccaaacgctggaagctccgcctcccagaggagatcagcccaggagtgggagtgaagaacttcgctccatcacaaagctctgaaatacagatggcttcggaaaaccccgtgagaacaccgattcactcctcctgtgagatgggactgcgtgtccccagagggctggcaactggcctccaagttttcctcttcctctttcttcctcccaagagcccaattaagaacttccagagtttagaaatgacttgggttgattatgtgtgcatgacgtgacctcactagacccagcacgaaagggaagcaggcctgggagccctcccccttgccctcgtcctggggtctgtgccgcgcctcgccgtcctcccctggaactcggggctgggagaggtcggcgtcaggaaggacctcatggggctttcacacgagagcacacatcctcagagccccccagcctcgttctgaaaatgaaagacggagatagcctgtgctctgagggctgcgcaccaggcgtcggggtggagattgactcctcgagctcctcggagccccagcgggtgccactgcccgccggctgagcccacgtcccgataggaagcctggggcgctcgcaggaagggtcacggatgctgcccggctccccaccagcctgcccctcaggacatctcctgaggctgccactgggaaagaacaaacttgggaatccaagatggagggcagcaggacgctcccacatcccccactggtcacttttggaagccatgcactcggccccagggcactaggcctgagtgctttaacacccagttcaggtgcctcccctaagacagggctgaggtctgggcagggagaggggcttgcaggcccacaggcccactcatggctggcgtggccacccacggagtctaactgcaatgactgagaacacaggcctgcccgaggctccccgggactcagccaaaggctcccagacgcctcccaggtggtttgacttttgcatctctgggaattctttcagcctcttcgtttattcattttacttcccctttacttgaggtggctttgttttcttttcaatgtctaatctatttctctcataggcgtcgttaatgggctgggacctgacttcctactaagtgtaattacctcgtctttaagtgcccttttcagtttttaaatcctgctgctgaaatccaacactggggagatgtcgtgaagcttttttaactccatcaggcggccgtcgcgcttcccttcacgctttccttcacccctccacggacatctggccctcatcccatccatgagtgacccacacagcacatttccagaactggcatttgtgacaggacacagcagcaaggaggcctgtccaccagcagcgaccgtgagcacggggcccttggagaaggagggaggcatccgcaccagctgctgtggcagaacaccagggcagggcagctgcaacaaccgacactcgctttgcacagctctgagactggaggtccaagatcagggtgctggcacagctgggctctggtgagggccctattcccactgcggatggtcactgccttgctgtgtcctcccatggtgggaaggaggagggcagccggctccctcatgatgctgtctcatggtcttgcctcagagccactctcgtgacctcacccaaccctaatcacctctggaaggccccgcctcctaacccatcccatcagggtggggctctaacacatgcatttgggggccccagctcctaacccatcccatcaggggtggggttctcatgcatgcacttggggggccctgcctaacccattgcatctggagtggggctctaacacatgcatttggggggccccagctcctaacccattgcatctggagtggggctctaacacatgcatttgggggccccagctcctaacccatcacatcaggggtggggttctaatgcatgcatttggggggccctgcctcctaatccattacattgggggtagagctctaacacatgcatttggggggccccagctcctaacccattgcatcagggtggggctctaacacatgcatttggggggccccagctcctaacccattgcatctggagtggggctctaacacatgcatttgggggccccagctcctaacccatcacatcaggggtggggttctaatgcatgcatttggggggccctgcctcctaacccattacatcgggggtagagctctaacacatgcatttggggggccccagctcctaacccattgcatcagggtggggctctaacacatgcatttggggggccccagctcctaacccattgcatctggagtggggctctaacacatgcatttgggggccccagctcctaacccatcacatcaggggtggggttctaatgcatgcatttggggggccctgcctcctaacccattacatcgggggtagagctctaacacatgcatttggggggccccagctcctaacccattgcatcagggtggggctctaacacatgcatttggggggccccagctcctaacccatcacatcaggggtagggttctaatgcatgcatttggggggccctgcctcctaacccattgcatcaaggtgggtctctaatgcatgcatttgagcccccgccaccgcctcctaaccacaccccattggggtggggctccagtacatgcatttggggggccccagctcctaagtcagcctgagaagatcagtgagaaaggtgaccatacattctggcaatacatactgttttttaaaaaataatttttctctagagactaggtcttactctgtagcctaggctggagtgcgggctggagtgtaggctggagtgcactgatgcaatctcagctcactacaatctcttcctctctggttcaagcgatttttctgcctcagcctcctgagctaggattacaggcacccaccaccatgccctgctaatttttctattattggtagagatggggtttcaccatgttggccaggctggtctcaaactcctgacctcaagcaatctgcccacctcagcctcccaaagttctgggattacaggtgtgagacaccgtgcatggcccgatactttcataatcaaaaaagtgtctacatacactgacaacaaccagtaaagaccacacgttttgtgcacttgacatgtgcatccaagggctcctgacaccccagagaaaccctagagagtggacactatcctccgtgtctacacactcaggcttaggagtctgcaccagcctccctgtctacacaaacaggcttgggaatctacatcatctttcccatgtacacacacaggcttgagagtctacaccacccttcctgtctacacctgcaggtttgggagcctaggctaccttccctgtatatttccacagacttgggagtctacactaccttcctgcgtacacacacatgcttgggagtctacaccaccttccccatgtacacacacaggcttgggagtctataccacccttcctgtctacacacatacaggcttgggagtctacactaccttcccctatacatgaataggctttggagtctacaccacattccccatgcatatacacaggcttgggagtctacaccacactccctaagcacacaaaggcttgggagtctataccacactccctgtctacacctgtaggcttgggagtctacacgaccttccctgtgtatatgcacaggcttaggagtctacaccagcctccccttatacacacacaggcttgggagtctagaccaccctccttgtctacacacacacacaggcttgggagtctacaccacctttcctgtctacaccaccttaactgtgtacagacacaggcttgggggtctacatcgccttccctgtctacacatgcacaggcttgggaatttataccaccctccttgtctacacacagaggcttaggagtctacaccaccttccctgtctaaatacgcacaggcttaggagtctatatcacccttcctgtctacacgcagacaggcctgggagtctacgccaccttccctgtctaaatatgcagacttgggagtctataacacccttcctgtctatacacaggcttgggagtctacaccacccttcctgcatttgggggatcccagctcctaacacattgcatcgggggggctctaacacatgcatttggagggctccagctcctaacccagtgtacacaacttccccatgtacacacataggcttaggagtctacaccaccctccctgtctaaacacacacaggcttgggagtctataccacatttcctcatagacttgggggtctacaccaattttgctgtgtaaaggcacaggtttgggagtctacattgccttccctgtctacacacacacaggcttgggagtctacagaaccttccttatataccccatctcttctaaaaatacaaaaaattagccggatgtggtggcatgtgcctgtagtcccagctactcaggaggctgaggcatgagaattgcttgaacctgggaggcggagttgtagtgagctgagatcgcgccactgcactccagcctgggcgaaagagtgagactccgtctcaaacaacaacaacaagaaaaacagagaccgaaaccagagagggtccttgtgcaactttgttttctgtccttggtcctgaaaccaggagacaattggttggttgtttagggcactgatgattctttaccagtatggtaaagagggtaattgctctgggaggtgaaaagtgcgtaagaattttgatcagtatctgtctatctgccatctatcatctgtctcatattgctttatctgtgttctctctctctctctctcccattatttattttctgagggtagagccttgaatactgggttttaaagttcttgattgctctcagcttgttctgggcacagaggatttaaggaatatttgagatttgaacaaaactgaaaaaagaccaactctgctagtcgcggctctggcccccctttttggtggagggggagtgggatgtggggttcttcggcccatgcctgctgctggccaggcccttccaagacgcagtggcctgggactataggatgtggctcccccgatccagcgcaggagcacagcccctccatgggctgtgtctggaatgccgcacatagccatctctgccccaaacagcagccccctctatatgatggggttttcgctcctgccagcagcacagacagccgcctcacctccccagcatcctcccagggaggctgagcccatcctcacccacgacccggggacacgtttaatttatccggcccctcctcgactaccaactcccctcaccggagatgcctgcctgggccctgaattctgaggctgcccacagcaagcctgatacagagtcacacaccagatgcacattacaaagagcgtcacagtggaatgagaggaaagcctgtgagaacaaacggatctccggtgctcagcagactgatctactgcaaatcacccccgacgcaaccaccaactccgccagaggaaatcacaagttttccatcttcagcagctcttacgactgcaagatcccacagctgccttttgggggaggttggggcttatgccttagggcgccagtcaggtccttccaggagaaggcggcaccaagcccagcgtcgaacgaagcaggtccttctcccttcacaagcagcatccacggctcagtggtgcccctcgcccccaccgctctgccctgccttcctcgctgaaacctcccaacactgacgtcaccggggtggggcaggagcaggaagaggcccatgctgccatgtcccatcccaacacaggggcagtcctgctgccctttcgttctctcccattgtgcccttggcagaagaatatatttccactcaactggcatcttccagctgtcccccagacccagcctccctcagctcccatggcagggttaggggcacaagcaccgcccgtcaacccttcacagaagctggcaacagagtcaggaatctgaagggtaaagggagctcttccgccaacaggtggccggtgttgcttcccagcgggttccacccactgcctagcaggccatctacatggggcagaccacagagacaggctccagcaagctcaggatgatgaagacacatcctatcttcgaggacccagctcgcagagaacaaaatctgtgaacaataatcacaacatggcacacacaacacacgtcccaaaataaatcttcactaggtacagagttggcaccaaatggctttctcctacaaaatcaaaacagccttggaatgtccttctttactagatcaacagatggttgtcatagatagatagatagatacctaataggatagactagatgacagatatagatgattgataaatagctgatagacattgttagatgtgaaagactatgttctattgatagatgatgatagataatgatagaggatagatatagatgggtgattgataggtggatatagatgatggataggtagacgattgacaggtaaagatagattagatagatagatagagatgattgatacgtaaagacagattagatgggctgggcatggtggcttacacctgtaatcccagcattttgggaggccgaggcgggcagatcacctgaggtcaagagttcaagaccagtctgggcaacatagtgaaactacgtctctactaaaaatacaaaaattagccgggcatggtggcgcatgcctgtaatcccagctactcaggaggctgaggcaggagaatcacttgaactgggaggcggaagttgcagtgagccgagaccacaccactgcactccagcctgggcgacagagcaaaactctgtttcaaaaaaaaaaaaaaagatagattagaaagataagttatataaatagatgtttgataggtgaatggagatgattcaaaggtagataggtagaggatagacagaacaaaacctggtctcctcccctcagagaacactgcagctcccgcgcaggtcagacggctcccgggcaggtcaggcggctcccgggcaggtcaggcggctcccgagcaggttgctcccacgcaggtcgctcccacgcaggtcaggcggctcccgcgcaggtcgctcccacgcaggtcaggcagctcccgcgcaggtcagacagctcccgggcaggtcaggcggctcccgtgaaggtcagggggctcccgtgcaggtcgctcccacgcaggtcaggcggctcccgcgcaggtcactcccacgcaggtcaggtggctcccgcacaggtcaggcggctcccacgcaggtcgctcccacgcaggtcgctcccacgcaggtcagagggctcccgcgcaggtcactcccaggcaggtggctcccgcgcaggtcaggcggctcctgtgcaggtcgctcctgggcaggtcgctcccgcgcagggcaggcggctcccgggcagggcaggcggctcccacgcaggtcaggcggctcccgcgcaggtcaggcggctcccacgcaggtcgctcccacgcaggtcagagggctcccgtgcaggtcactcccaggcaggtggctcccgcgcaggtcaggcggctcctgtgcaggtcgctcctgggcaggtcgctcccgcgcagggcaggcggctcccgcgcaggtcagacggctcccacgcaggtcaggcggctcccacgcagtttaggcagctcccgcgcaggtcaggcagctcccgtgcaggttagacatcttttctgccatcatgggctctgattccccaacctggtgccatggtccactcagtcgcttcttggccctgcaggtacaagccagccagtccacaaaggtcacggccgccgctccgctcaacccgtggctggctgtgctcgggtgtgtttcctcacctctctctctgaagagctgagaacaggcccctcctggcctacgctttctcatcatgtagctgtatttctgggctcacacctttagaacccactgagatttctaaagctcctcctctagtgagcaacctgggatgtttgtgctcaaagaaaacagcgtttccagagcaccatggcgcctagaagtgggctggccaatgtggtcaggaaggaagggtgacttgggaccctcacactgactgtgcatggaaacccccgtggtccactctcctagtgaggcacctcgccctcttcccagcattcccagcagcactattgataaagctctcctggtaaggcacctcgccatcttcccagcagtagctattggttaacttcatagacccccttttaaataattctttgtatttttgtttttagagacagggtctcactctgttgcccaggctggagtgcagtggtatcatcattactcactgcagccttgaacttctgggcttgggggatcctcctgcctcagcctcccaaggagctgagaccacaggcaagagccaccacaccccactaaatttttcattgttctggagagacggggtcttgctatgttgcccagcctggtcttgaactcctggcctcaagcaatcctcccacctcagcctcccaaagtgctgggattacaggcctgagccactgcacccaggtcttttaaaataattcttacataacaggtaacttcagtccagacacaaatactaaattagtagactccaaatgtattgttggattgtctctagcctatggccatgttctcttctttagatcctgaggccgcagggtgcagctttccatttgtaaactgtccctggggtgctgccccagggggtgctgagcagtgaacactgcccagctaccagttggtcccagggacatgaaggcctggcacctgcagagcccagcggaggcagggtacctccagccaatatttccaggcacctagaggcaggtgtgtcctcacaaatggagcctgtgaaaaaacaggtgcagcaatgagggacccaaaggtgagcagggaaagagtctccataatttggcacagagaggagcaggattctcctcagtattcacgccaagccaggcaggtccttgcaccttctggatacatcagtgctagactaaaaaaaaaaaaaaaaaaaaaaaagcagtaatctggagtccttcctctggggtgccactcagcttctctggacaggaggctctcagactgcacaccaagagatgaggcccagaagacagagacctctcacctcttaacacctccccaggtctgaccaggggttaattatgactgtatgtcatgtttccaatgaggaggagctggatccccgaggtctgcaggcagcagggaggggccacactggggggtccagaggcccaggaagactctcaaacccagacccagtgaggccctgcctggccccagatcccgacagagcagaggccacaaagtgatggttctcccggagcccccagcaggaattcttccagtgcttggaggagattcttctctcatgttttctttgttcttcatcaccccatttaaaaaggaataataagaaaaatattttgtataaaaatgaatttctattgctctcattacacaatgttttcttaaagagaagcaaaaaagaagaaaataaaatgcattcaccacatcctactcatacttctcaacactgtaatattttaacgatccatatgaggtcataccatatgtacttttttgatacctgactttttctttctcagaatgacacacttccatctttccaggccaatacccagcctggcaggactccaccatgaggcacatccacttgttcacctgcctccctcttaccgaatattcgttcccaatgcaaataacgactgtcccatcgcagggtgcagaggagataggctgttcactcagcctgagcagttcctctttctgagatgtgaccacaggaggtgaccgcggggatacctcacccagccagcttttcagggccccctctgaggctgcaatcacccctgcatcaccttttggccccttccctgccactccctctcacagaagtgatgtcagtaaagaatggacacaggctgcctccctcatgactggggtccttggtcccagggaccctggaaggcctggagcaaagaaggtcatctgagaggtgaggcgatgtcaaagaacaaaatcctcccagctgttgtctccccacttacatatttttttattgtggtaaaaatagaataaaatgtaccatcttaatcatttctaaatcttcagttcactagtgttaactatgcacattgttctccaacagatccccagaattttctcaccttcccaaactgaaactctgtcccgattaaacactgactcccctttcccctgctccgttccactttctgttcctgtgaacttgatgattctaaccacctcgtatcaaacagcatttgtccttttaggaccggcttctttcactcagcataatgtattcaaaggccacccatggtgtagcacgctgaagactgggtaataagtccaccgtgtggatggatggaccacatcttgcttaccactcatccgtcagtggacacttgggtggcttctaaccttcggttattgtgaatagtgctgctatgagcatggatgtgccaatatctgtccaggtccctacttctgatggtttcaggtatgtatgtacccagaagtgggcgtgttttaacgcttacctcatatagtttctgatcatgtgcacgaacacttagagtaataggcaaatgttttggcctcgctaggggacaaatggggggtttgcttattttacatgaattgctggactgctaggtgaaagtggaactgatattctttgagaccctactaagtgtcaacatgcagagaacacaacgtgtaagaacggtgaccacttgcgctccgcgcgcaggactgtgctgggaccgtgtggcggttcctcactgtgtccccaggcagtctcacaaggcaggtgtggccatcgcctcaccttcagcagaaacccaccatgagcaggggcacatgggcggcacttttcatgaagccctttgagaacagacatcaaccatgtgaatgttactccttaagttagagccaaagatatttggtttgccaaaaacacatgactagaacactgcatcttgaacagctttaaaagaaggcagctgtcctaacctgcatcctcccagcagggtacaggttaaaaaacctaaagcaacgcagccttgcatcgaagagaaatcttgtccatatgttgttccttcacgtgtgactgggcatcggttgattaatctgatttttgtagtccatgcatgtcaataaggcccattcacatgtcagaatgtgcacagggttattctgttagtgtggcaagaagggcagggcctgggaatcgggagccctgtttctaattttagtgaagtcttccacccttgatcttgatgaatacttgatcaagtcaataaatatcaaagattaagaaagattacgtagatcgggacattagattacttaattctcatagttccttgaagtcagaatttccaatgattctagaagtaataaccccagtaattctcattactacttcaaggtatttttgaaaattacaattctgtaacacccgttgccttagaagtctccccaggtctaagagataaacccctgcctgagaaaatccccctgacagctcttcgggggtgtggggctccttctgtaaagaggaaaatgccgcttctgcaggacatgggtgaccttgagcaactgcatgttttctcaccaaatacaaggaattttttaaagaaaagaccaaatggtgttacacaccagaaggtttgggtgatatttcaattttttttattttaaagcaagtataaactttttctgataattcattggcttctgcactgactcagaccttgatgctctaattgtggcctcaagactggcagctttggcctccccagggctggtcagaaatgcagaatattgggtctaacatacctcagaaaatgcactttgacatttaacaatcctgaatgactcaaaagcatagcacaggtctgtgcacagtccctgtgcaagacaagacacttccgacaggggagatggcccgggccaacaccaggaccaaactctcactaggggggaccgtgccaccccccacagtagcagcagctctccctacctcccatccccactgcccgtggccctggaacaccacaatttgggtgaagcattgcagcccagcaagcgtggtccccaagaagaggaacactgagaggaagctcactgagggctgagacactgagctgcagacctgcctctctctcgtgcgaagagattcacaaaggggccaatgaacacatgtcttttgagatctcatgacctccaagagaagtctctctgtcaggaaatgtcttagctggaactgtaacagaatgccacaggtcgggtggcctggaaacaacagaccttgatttctcacagctctgaaggctgtgaagtcggagagcagggcaccaggagactcggcatcccaaggtcctgcttcctggatcatagatgacgccttctcgccatggtctcactccatgaagggggcgaggaagctctctggagctgccttattagtgactgatgagctcgaatcccatcaggagcatccacctttgagaccttgtcacctcccaaagcccccatctcctaacaccagcatgtcaggagctaggtttcaacacatgcacttgcggggacaaacacccagaccagaacaggaagagggcaaatagccttactcctccatctgccctttacatgaaaaatataatcgtggaatcaactgcggcaacagcagcagaggaaatgcaaatcaatgcagcgaaacccagggcctgtcagcattaagacacccattccacctcccacaaacaaacccagtgttatgttaaagtttcctattattaatagtccatttagcacttgaaagccacaaggctgattgtgcatgaagccctgtgtgcttgcttgggagcctgaaggagagtgtgttgagtgataatggcgtgaaggcaaagctcttggaagaccgctggcctgaatcatacgtgaagccttgccacgtcaggatcaatgacgctcccaggggcacatacctcaacagaatgggacacagctcaacaatcccatgtatggacaatgtgaattaactaaacaacaaagccttcatcatgctgagtgcaggccctttaaagaccagaatgtgtccccatccgttccagcattagtgcatggcagaggccgagagcggagtgtttcccacagcaaatgtttcctggcccaggaaaacctacattgagggggcagggtgtggtcctcctggtttcagagaaatcaaccacggccacagcctcgtccacatagagcctctcgaagccttgcacggacaaagaaggtatctgctggtgcagtgccaccgaagaagagaggtcctacctgaaacctcacagggaaatttgtgccttctcccaaggcaggaccacaagtttgcagctcgagaccttgtccagggtcctaaaatggcttcttggaaaatatgaaattgctgaccgatccccagcatcaacttcgccaatagccttgtgcttctcgttcaaagcaagaagtacccaagtggaacgcagatacggcacgtcagtgagaacaaaagcatcacaaaatgcaagtcttattactgcagcagtttgcaagttggccgtgatgtctcataatatgaagtttgggtgaggcggtgccaaaacccagctggtgcaagctaaaaaaatgaccaagatataaggccgtggaaatgcaacttgattacaacaaacacttagtggagctaatcacacagcattcagatgctcccagcccaccccgatgggagtgttggatgaagaatcctgcagctctcgccggggacatctgaacatccttgttagctcagggcacaccctctgcagagactcacaggcatgtggcgtggcagtacatgagcactgatgtgtgaggggagaagagaggggccttccatctaggggcacagtctccctcccttccccttatccctcagattgtgaagaaacaagtgaggtctttgattagatgcctattttttagggaatggtcttttctgtttataggatctatgcatagcatatatttctaagattggggtcattccttacacctggatttgttctccagtaagtggttagaacttgggctctgatgccacagtgcctgggatgtctacgaaacacacatcatgacagctcctgcatcagggggctgctgggatgattaaacaaaattatacaaagatgatacaaagaaagggctagggcagcacttgcggggggcacagccagctctggatctgagttaactgttgccatacgtcttgttaatcacaggtctagggactgtcccgtacctccacacaaagacctacctcattctttccaacagctgcaggatattctgtggtgtgaatatgatatatttaactaacctcttgcttatgaaaaatcaagttgtttcaaatgagtattatgacaaaaaaaaaggcagcaatgaacacgcttatgcaaacatctttgcacatgtgtgcaagtaagtttgtaaggaaaattcctagaagtgggatttgggggtaatagaattgtacattttgtgatggatacagccaatcgacctgtgagcagctgagctgactcccacctccatcaccaggacgtgaggctgccaggcaccacccccatcaccaacaccagcaaggccagctgtgcggctgccatcccagtgctcctgaagcatggaaccaacacgaagcagcacggggctaggcagttgccagggagccaggagacgggtgcatgccaggccctggccccagcccccaagccccctgcccacccttcatgccccaggaatacctggcttgactcctcaccttccactgcaccctccagctccatctagaccctttccctcagcatggcagcttcacccacacatgtttatttaaagcacaggcaaagaatgccagtggtaaggccagagggcgggcagctcagcacggcagaccacagatcccttctcagcccaggaaatggctctgtggcccatatcagccaggaaaatgaagggtcacagacgccctgctgggagctaaagagaaatgtgtgcaaatctaaggagaaatgtgcaaggctcgtgccttccctgtggtgtgtgcctgctctttaatgagagttgcattctcctgagggagaccctgcgcaggccctgccccacgtaacggctttacacaaactctaaaaagtcatcccagccatgcatggacccagggatgctgacaccattcagaaaattgtattgtggaggaaggcaaggatgaaacaaacaaggcatggaggcttctgctctataaaactatgaggttcccaggaacatgacacagtccgtgctacatcagatctgagtatcaggatccagccgtatttgacttttagagctgcaatctatacaggcatatttgtggctacataaacatagattatcagaatggaactaaatatgcagcttttaaatacaaccacaccaaagggaactttgcaaattaccgggaactttgcaaattcccaggaactttgcaaattacctctcatcctgagaggtgagacagagccagctctgggctgtggctggtcatctcaaccccaggtgccacaggccatctggacaccacctctgctgagcacaaaggtggacgtgtccccaaaatagcagctttgctcagaattccaaacagggcctcagctcaatggtgagaaatcttaactcggacggcaaacttcccgtctgggatctgcaggcttcaacaactgtcaaagcacgggaaaatccccaggaagaaagtaagcaaaggcacggtagacgccaagggtccaggagtcgccctctgttacttcatgactccaacttactttctacacacaagacatagaaaccatctcatgcaagccccccaggaaccctggaggcaggcactgttcccgtagttacccgcacgtctagagactgtcccacatctccaaacacagatctgcctattgtctctgccagatgcaggatattctgatgaggaaaccgaggcatggagcttcttaggaactttccacaggtcacctgacactaagcccacaacactgtcctctaaatatttaggacacctatattttcctttgtgtcagccatttctctccctttaaaaatctctccctgagattatggataattttgataactttgagaatcaataaaattactctttttatccactgacatcagaagtggccaagcttggccgggcgcagtggctaacacctataatcccagcactttgggaggccaaggtgggtggatcacctgaggttaggagttcaagaccagcctcaccaacatggtgaagccctgtctttactaaaaatacaaaaaattaactgggcgtggtggcgggcacctgttatcccaggcactcaggagactgaggcaggagaattgcttgaacccaggaggaggaaattgcagtgagccaagatcgcaccattgcactccagcctgggtgacaagagcaaaactgtctcaaaaaaaaaaaaagaagtggccaagctttagctcctgagcaattccagaagagactcagccatcgagctgactgtagcctcccgaggacaagctttgggaaacaggccccatagcgggcacttggcagccccgggccaggcatcctgccacaagcaccgcacaaaaggtactctgcaggtgactgggcatttaaaggactagggagccctggacacttgaaactgaagtcctttctcaatttctgaattccctcctctaaaggtctccatcctggatcttgttagagatgctatttttgctgttggccacccttcgcggggtttggtaataaaagattgttaaagtggggttttttttgttttgttttgttttgtttgtttgagacagagtctcactctgtcacccaggctggagtgcagtggcacaatctctgctcactgcaacctctacctcctgagttcaagcaactctcctgcctcaatgtcccaagtagctgggattatagggagccgctaccacaccaagcaaatttttgtatttttagtagagatggtttcaccatattggccaggctggtctcaaactcctgacctcaagtgatccacccacctcagcctcccaaagtgctgagattataggcatgagccaccatgcccaaccaaaagattgttaaagtttaaaaaataaataaataaaagtctccaaaggagaaaggatttttcattttcttcttcattttttctgaaggggaggaaggtaaggagaacagctccctgtgcttctaatttaagtatctacattttcacaagtccccattaacatagccaatccttaacaaaggctagaatgtgggactgatcaaacattagagaaagccccattgccctcacgggccacctgcctggcacacacctgtgtgcacttcccacatatttatggtgtttatcccagcgtttgctgggctggagaactggccattctgtcactgtgacaaacaggcctgacgaggccagccgtgcctgcgattgcattttccactctccaaacagaatctattagacatgatgcaagcagagattatttttaggaaggcttttcattacagtgatgtgaaatgtcaaggctgagactcagcaggctctatgcagacctccggctcccactcattaagttcctgccacgtgctacgcccaggctgggccctggacaacacaagtaggtccccaattaacagccaagttaattaactgattggaaacacaggggaaagctgtcttgggcggggacatggccctcgaggagcaagcggactgaaggggtacgggcatcgtgccgaaaggggtagagacagcatggtcagggactctgcaaggggagagaacatcaagcccagtgaacactgggggctgcacccccccacacctgatgaggggcagagaaaaccaaatggtgaacccccatctcacctcatcccacccttccttgctgcccaggtgtgcaagatggggcacgggccatcccaactccaagtctggcctggacacagaaatgaccaacgtgctaacgacagtcagaagctgatgagactcttatctttcctttattaaaaactcttttgcccaggtgcagtggctcacatctgtaatcccaacactttgggaggctgatgcaggcagatcacttgaggtcacaagttcgagaccagcctggccaacatggtgaaacctcgtatctactaaaaatataaaaattagctgggtgtggtggtacatgcctgtagttccagctacttgggaggctgaggcaggagaatcgcttgagccctggaggcaaaggttgcagtgagccaagatcacaccactgcactccagcctgggcaagagtgagactctgtctaataataataataatgttttaaattttatacctgcaaacagtatctagctcaacttcctcatttcaagaatggggaaactgagatgcagagaaaggagatgaaccgcccaagctcacacacaatatagcgaagccaaacttttatatgtcactcccagaggcggtaggaacatcacatgcttccttttggagaccttggtttggagaagaaaaaaaaaaaacagcttttagagtagattttctttttttgaactactgaggaaatctgcaggaaaagagggtcttcaaatactggggtaaatcatatgactgacttgtattacacaaagctgagatttataacaaatactctaaacaactactcctggagcaaacagctttcacctatcacactttacagaaatattctttaaaatagtggtttctatttttttctatctttttaatttcacagactaataatcttttttaacaaactggggtaacctacatgtaaagttgccaaatctttatgtgtgtaactaaaaatgtttaaataaaaaaaaaaactttcctatcacacttcttttaaaaattactaacattaaaaaatattcctccaggcacaggattacacctgtaatcccaacacttcaggaggctaaggtgggaggaacactttagcccaggagtttgaggacagtctggtcaacatagtgagaccccatctctacaaaaaatacaaaaattaagcaggtgtgagggattaggcctgtggtccccgctcctggggaggctgagacaggagaatcactggagcccaaggcatgggaggctacagtgagctgtgactatttggctgcactccagcctgggcgacagagcaagaatgtgtttcaaaacacatataactaactgtacatgtatgtatgtgaaatctcaggaatttaggtattttaaggggaatacatctgacaataggaatgcagcgtttccacgggttgactggcgctggccgtgccctggaggctcctggcccagggaggccccgtgtccctgagcgaacgcaccggctttgggttgtaaaccagggagtttggacttaattcccagaactcaatcaccactgagcgacctcgaaaaagatcacgtgggcctcacaggacgagggccagacccagatgcgcccgcttgggcggacgagactccctgacaccctccccgggacgtcacagcggaggaaggctaggagctcgcgcacgccaggctgtggggccgaggggtccggctctcagggtcctgctctcagggtcctgctgggcccctcaccaggaagaggggacacggaggcagcagctcccagcggcctcgagggcgccactgacaggagcgcggggcacaaggctgcccaacaagaacgcggggcgcgaggccgcctaactgacaggaacgcggggcgcgaggccgcctgacaggaacgcggggcgcgaggccgcctgactgacaggaacgcggggcgcgaggccgcctgactgacaggaacgcggggcgcgaggccgcctgactgacaggaacgcggggcgcgaggccgcctgactgacaggaacgcggggcgcgaggccgcctgactgacaggaacgcggggcgcgaggccgcctgacaggaactcggggcgcgaggccgcctgacaggagcgcggggcggcgccctcccggcctccctcagccccgcgccctggccagcgggtgccgctcgcagacgggggagcccagagcccacgcgccaaggccgccaggcctttcctccctcgcgttccctcaggcgcgtcctccacccgtttcccccaggcagggggaagccccgagaagccgccgcgccgggctgagatcgggccccaggctctccgcggagccgtctccaacccctgcaggccgacctgggcagccaggcggggagcgcgcagccacagcccgcgtttccgggctccgtgtccttctggaggccgctccttggccatgggccctcggtcctcgccctgagcagcgcgccggggtataagggacgccctcagaggcctccaccccacactccaccgcgctctgccaaccgggacaaggtgttttgctgaataaataaattaatacataataaaggctgcgtccaaccagatgaggacagaaccgagcgccctccagcaccctctcccaccatccatcctcacagacggactctgcaccgtgagaaagcggcttcggcagctccgacccctcaactgacgcgtctccccgtggtgggtcccgatcccccggccggctctgccactgaagcctctccctgtgtcctccgtgccccccgagtggcctgctagcccgctctcccacacagtctccttgatgtgaagtgtcacccggcttgctgcggcgtgtctccgccgtaacacgtgtataccggctcagcacgcggctgggtacggtttgcaacgccgagagcccgcggagaagcttgagcctgtgagcccccgtctccgaccacggactcaccgggaagcaccaaggagaaccgcctcctcaggaaccctgtggagctcatggcttttgtgactgagactaaaagcatccataaaagcccgacattgtggaaagacacaaacgtgcatggacctggttacctctggccttcctctgctcagaagcccacccctgcagagcaaagcccgggtcccggatggcaaagccatacgcaggagccttcccagcagccgccgccatggctgacgcactggcaggagccgcaccggacactccacctagtccctcttcaggttttaatccattctgttttatttcatttgattttatttcattttatttccaagccctgtggcaaggcttggaatattttttgtttttgtttttgcttatttttttttaattatgccgtgtgttggcacacttcatgaaaagcacctatttctggccaggcacagtggctcacgcctgtaatcccagcactttgggaggccgaggtgggtggatcacctgaggtcaggagtttgagaccagtctgatgaaaccccatctctacttaaaaaatacaaaaattagccaagcatggtagtgggcgcctgtaatcccagctacttgggacgctgaggcaggagaatcacttgaacatgggaggcagaggttgcagtgagctgagattgcaccactgcactccagcctgggtaatagagtgagactccaactcaaaaaaaacaaaaacaaaaaaaaacaaaaaaaaacacacacctatttctttttttttttttttttttttcttttgagcaggagtgaaagtattaaaaagctttagagcaggaatgaaaggaaggaaagtacacttggaagagggtcaagcaggggacttgagggatcaaatgcgtggtttgaccttttgacttggggttttatatgttggcatacttctggggtcttgcgttacttctcccctgattcttcaaaaagcacctatttcttaaggatccaaaaaaataaaaaccaatttcattgctgctgtttccatttcttggcaaaaattaggaaacacaactaaataaatatccacggaataaaatggtgcatttattcaccaaagtcttatcacacgtggagatgaataagaacttcccgagccaagaacagtatatacaacatggaaaattctctagagttattaagtgaattaacctcatgaaattctactataagataagcactaggaatgcactggaaagagaaaggtgctagtgagcttctggaagcacagaaggttctgaaaggcagggaaggttctagaaggcagaaaaggttcaggagcttctggaaagcagggaaggttctggagggcagggactctgtcttgctcgtgtttgcaagtccaatgactagcacatagtaggtattcagtacaatgttctgaaaagaggtttctctgtctggctgtctagttgggtggaaaactgatcctcttcgttcacagtgagatagaggaacctgaaaaggataaacatatgaattcccctcaaaatgttgttttgtttggtactgggtagtgatgtgaacaactgtggggttaacttaaggctctagttatgctacctcctccagagaagatccactttgccccatctagcggctgaggattccagcagccctgacagccctgacccaccagggcactgagccagctctgtgcctacgaagacagctgtctgctgaaccctttctgggtgcagcctgctgggtcctaactcgagtctctgaggcataccagggacctctgcccaacagctctccgaggctcctgatcaggaccggctgacacctctggaaaacactgaccctaagtgccacatccctacccttctcctgggtctctgccctctgactcatcactgtgatccttcattatttcatacattttgtccagatctgtttttggtgccagggtcattgactcccttagtccaccactactggacacagcactcagagatctttgccacttaaattgctttacactttgttcttcagtaaaaaattattaagctgatataggaacagcagtttctaaataaagatgagactatagtacatattatcagcccactgattttgccagtatagtaagcttgcaagtatgagtttatactttctgaatgatttacattttattccaactaaataaataaatctcactccatgacattttctaagctgaggaatagttgttaattcattttgaaatgttcttagactaagaatctaaatttaaaagagtaattagcatgatgcatgatgaatggacaagagtcttctgaggcacacagtaatgtatttcttccctcattttacttttataaaaatacttaatgggaattaatgatcatcctctggtacagatgcctcatctgatcatcaacatttctttgtatgtcactaacactatacccagctaaacaattcaagatgttcagagaaatggaggggggatgggaaagggaatctgcttcctagaaatgcagaaaacatcaactttgggtgctgaggaggccagaatagatttttaaataaagtcaaacaattttcagaaaaagattatgttacttgtgaaaagtcattcgttggtatcaattttaaaaataaagagtcagcataggggtcttcaatccaatcctagagtagcagagctagaagcggtctggaggagtgaccacttctcctttctgactgccagtgctcaccacagcttcatgtctctggggttctttccttgaaaatcaaccaaccaagagctcgggtctctgtccaggaaggtcaacagcaagtcactccccatgcctgggtctgaatgtccttatgtggaagttacttatgaatcgatgaaactggaccagagactcttttccagctctgagagtctgtaattgatgtattcatttattcagcaaaaattactgaacatatatattgacatatgcccactcttagatgtcctaaaaattaagcttgatatatgggctaatgctggagccccacgagaccccacagcaaatggcctcttgggatctggtgccagaagagtgggcccccttgtgtcattctcaaactatgctgcaatttccatgggcctgtgaagagatttatggattaggtgacccattttaactatacgtaatccagagatttgaaaagattcttagaaaggaatcgtggattgttaataagacaaatacaagaaaatctgtacttccaatgggagctcttctttagacacattttgaagtggaaagcatcacagttagacccacaagaaggcaaccagaaagattaaaaatcatcgttcggactttctcaattatagatttatgcatattttcagtagtgatgagcactgttctcagcatatattgtgcatcgagacagcaaataaccatagattgaagctctccagattagacacttaaaaactaagtatctaaaatgttattaatcacattaataaaaattttagtgaatacaaagaagtttttgtatcttcagcaaaatattttaatcattagtgatgtttaatttctcattctcttaaatttgttttgaattttttattataaacatacaatgagttcagtagagcacatatataacttgtaaataagaatatgtatccggtaaataaatgcacatttctgttggtggcgccatcagacactgagacactgagaggaggggccacaagggggatgaggcagaagcctcctgccagtgagggcccaagagccctgtccagggcttgggcttccttcctaaggttagatgtggggcagctctggcagaagagtgataggatcagattttcagttgtggcagttactctagccagaactggaaggtggcatggaaggggccaatacttctttctttcttttaaagtttgttctgccataatttaggccaaattcttcctctgctacatgtgaggactgcatgcccggcagcttcctccacatgcatcaggctgctggacaggccttgctggcacactgggtgggtggctccgtggagtgtcctgcctactgcaggatgtcgaacaacgtccctgtccgccatccacctagtcccagcagcagaggtgagagccactgatttacacggcagaactggccaccaccagactactcaccctcttctccttcaggctgcaaattaaaacagacttccatcctttcttcaaaggacatatttttcttcccttttgtcatttattttacacaggaaagtagcatcttttaatagtctagaagaactatttcaacatttggaacatgctaacaatatacccacacatggtagaatctttcaaaatgaggctttgattttggagttcgtacttattttatctacaatctttgtcaaacatgttatcttatgtgaaatcacctgtaacaatctgggacattcttttttttcatagtgcttgacttaccctgaatatctgacgttctttcagagtgctatgaaaaatattaaatcattaaacaaatgttatatattatttaaaagtaccaataaaccaaacacgtcactttttaacatttgctattgactgatattgtcaataatgtagttggctagccccataagatgggttttactttttatcactgctcactgtagcctcaaactcctgggctcaagtgatcctcctgtctcagccttccaaataagtgagaccacaggtgtgtgccaccaggcccagctaattttttacattttttgtagagatagagtctcactgtgttgcccaggctggtctcaaactcttggcctcaatcagtcctcccacctcagcctcccaaagtgcttggattacaggcatgagccaatgtgcccggccaggttttacatctatatttcaacccctcagaacctgtggaggatacaagaggcataactacataagtatccaaatttttcacacagttgcatgtttttattttctcagaagggcactaaatcaacacatctcttgagaactacatcttacttcccaaagagacaaaatagttataaccaataataatttcagtattactagaaattataataaaaatttaaaaataagtagattgttttatagaaaactaaaccaagaatctaatctttatttttaaaaatattttccacttgaaaacatttcctttttcaagtgatcaaaatgcttccttcttgttaagctcacagcaatgaaaaactcatttaaaaaatgttctctgagtttgcaacatccccattccatatgctgtcaatactttccccgctggaagagcctgcctcttaccccaaataagcagcaagcaggaactcccaggcctgggtgaggtgtgtcccctggtgtggtcactcagacagagctgtgtgtctgcaaacacaccaagtcactcacagccaggcactgccagcccgggctgcctgcacagcaaccctgtcaggctcatgcagaagaagccgttttcagaccacactcgttttgcaagaacgaacatctctgtaaagttctgcttctgacgtcacagtttctctattccacacaactctgcctcaaagccttttttaagcacattccaggcacaagtgtgagccagaaaaagggctgaaaacatgaggggccctctcgggacaagccccggggcccacagcctgcaccaccagggacatgggggctgctaaggagcctcccaccagcacctctgcctgcctctcccgcagaggcctccggggagtaacatgctgctgatctgagtgaacataaggaacaggaacacaccacaaaggtcccacagaagcacagcatggggagccatggctgacagccagtggtcaagacagaggttctggagcaagatggaaatgcacagggcatctggctcccagtcctgcccgatgccacaaacaccatggggcctgcacaacactgagagctcccaaacaccacaaacagcatggggcctacacaacactgagggctccccaccctgcctgatgccacaaacaacatggggcctacacaacactgagggctgcccaccctgcctgatgccacagacagcatggggcctgcacaacactgagggctccccaccctgcctgatgccacaaacaacatggggcctacacaacactgagggctgcgcaccctgcctgatgccacagacagcatggggcctgcacaacactgagggctccccaccctgcctgatgccacaaacagcatggggcctacacaacactgagggctgcccaccctgcctgatgccacagacagcatggggcctacacaacactgagggctcccagccctcctgaatgccacagacagcatggggcctgcacaacactgagggctccccaccctgcctgatgccacagacagcatggggcctgcacaacactgagggctcccagccctcctgaatgccacagacagcatggggcctgcacaacactgagggctccccaccctgcctgatgccacagacagcatggggcctgcacaacactgagggctgcccaccctgcctgatgccacagacagcatggggcctgcacaacactgagggctccccaccctgcctgatgccacagacaacatggggcctacacaacactgagggctgcccaccctgcctgatgccacagacagcatggggcctgcacaacactgagggctccccaccctgcctgatgccacaaacagcatggggcctgcacaacactgagggctcccagccctcccgaatgccacagacagcatggggcctgcacaacactgtgggctcctaagaaagcccaaacagcaaagtgagcactcaccttgtcttcatttcctctaagaggaagactgttgtaacctgataaaacagacagataaaggataggatgtgaccacaggaatggggtccaccagagccaccgatccccaagtatgggatgtgatgacagggacagggcccatccagggcccacaggtctccccttggactctgacacaatcctaagtggatggagtaagggaaagggccctgtgcaaactctgaatagtgcactgggccctaacacagaccctgcactgcccggccacctccctctccccttgccatccccacaggccaggaagatgggcacagcaagactgcccacccttaccctgcaggccagagggcaaagcaagccagccagacactcacctcgcttcagaagagcaaagggaacaacacccacccggcaagctcgttgacaagaccaaaattcaggcacttaaaaacagtgcaacctagacatgccaagtatactaaaaaacgtgctctgaattttgcatttatcaaatattacataataaaacattttaaaagaaagtgtttagcatatctaaaaaaagtgtatgtactatctctttttattatactttctactcaaacttgtaagaaatttgtatgaatattatttaagtcacctttttttttttttgagattccagaggccaggcatggtggctcatgcctataatctcagcagtttgggaggacaaggaaggaggatcacttgagtccaggagttcaagccaggcatggtggcacatacctgtagtatcagctactcaggaggctgagtggggagaaacacttgagcccaggagttcagggctgcagtgaactatgactatgccactgcactccagtctgggctacagagccagaccctgtctctgtaaaaaaaaaaaaaatcatagattcaaagagtacatgtatacgcaggtttgttacgtgggtgtattgagtgatgccgactgttgggtttatgatgatcctgtcacccaaacgaggaacacagtacttgataagtagttttttgacccttggctccttcctccctcccttctttaggcattcccagtgtctattgttcccttaagtcctacttcttctctttttttttttgttgttgttgttgttgagacagagtctccctctgttgcccaggctgcagtgcactggcacaatctcatttcactgcatcctccatcttccaggttcaagtgattctcctgcctcagccccccaagtagctgggattacaggcacctgccactacaaccagctaatttttatatttttagtagagacggggtttcaccatgttggccaggctggtctcgaactcctgacctcagatgatctgcccacctcagcctcccgaagtgctgggattacaggcgtgagccactgcgcctggccaagtcccacttcttttattcaagggctttacagtcatcaaagggatgatgtgaaataaactccaaagggctgtcaccatcagttactctcatcatcacaacaaaaccaggcctcatccttattgatgtaacctgtttggatatgcctattaagaaatataaatgatattactctttaaaaggtaatggcaatgcttttgcaataatctctattgtcagttcatctgagacttggattttctaaagtaatattgtttctaacaataacaatattccatcctgtcagccaccacctccaacattaactgtagaaacctggagcatccaaaaataacaaccactatgacttatcagaaactctgtggttaccaaggactctcccacccatctcaggtaatcctctcaaaaacatgaagaaccaggtattttgctcaaggtgtaaatccagagagattataggtgaagtctttccatttctcttgacttctaatatgagtgcaagtgcaaactgtaaagattatctgattggaaagataaggtgacctctcaatctgtcaacacgctgcatggaagcagtactgtcatttaatttgtgctcttgaaacagccacatattccctattccctaccatatttgcagaaatcaccagcagtttctgactctgctagaatcctctttctatttcagtgaaaaagccccatttctgttaccttaactgatcataatttcatgttggctatttcatagaatcaaggaccataacagcataacaaagcaggcacatggatgccgcaagtcttctaccacaagaatgggtgccgctccataggaactgatggctgtgcttcccacagcagctctaaccacagctgtatctcagtgcagaacactcaaatcagatggaagtccagtggtctcaaccttggcctgttttcaggaaaagcagagaaagagattcaagaactcttagtaaaagagatgtgagggacaaaatggacttgaggtgggaagtcatcagacagcagctcctgccactgctttacctatgttccatcccctgcctccggctaagaaatggagcttgcgctggtgtgcacagttgagtcctctagaagagcggctatttcagagaatgtacacattgtggggtcagcctcaaattgtaccacagattaactgctgctttgagctggattaaaatcacagcctctgactgccaattttattagcggctccatccatttacaagttgaatgtatttcacatttggaaccagaattcacttgcatgattaatatgaagtcctttcctttcagaaaccaggtcagccttccttctgaaaattccttccgccaaacaaaccatttctaaacatgccctttgtgctgtatacagaacactgcatcagaagccttttcaaaatgacctttcagaaccacgtggtgacggagcacccacatcacatgatagaaaattctacactttccttccaccagcatagttcagaaaagagtagggagtccctgaaccaaccccctgcctgcttgccactctaaacatcaaacctaaacagaacctactcttaaataaatgttcttaggaaagtaatccctctctcatcccttattctgaagtgggtttttgttatgacaagtctgagatgagagctcacttctttggtgtttgtgtcaccacgtttttaaaaacctgacggaagcccagaaagcattcggaacataaaatttttatggacacatcgagtagtgaatcctaagggtggcattttcattccctgccattatgggaaggacaaaagtctccaaaaataagtcgcccatttccaaacatcaaaattccctcagaaggcacaccaaatatttgaatctgacacccaaaacaaaacccaactcagaaaatcaatcccctgctggtgccaaagagcactttaaaatctccgtggcctgaggttgagaagcttctaagagaaaggcagtttgacaagtgaaatggtccccactcctgtaagaacgagacagacgtccttgttctgtgcaaccagagagacatgttctgacagcgtgtagaatcctcggcccatcctgggatgaccactgggagagaaaggaggctccagagacctaggaccccatcccaggactacccaccaggtgtcctgtggtacattccttaaccactccaagactcagtctttctatctgtaaattgaagatagaaatacctatgcgggttattctggggaatacatgtcagtgaacatggaaggctcaggggttcaagatttgggggtacccagaggtacagggatgggagaggctgtcactgtgaagggagcacactgggaagttttgggggtgatggaatgatccgtacactgacagaggaggtggccacctgaatctatatgtaacacagtacaccaaaaaagaaaagtccattttactttatgataatttaaaattaaattttaaaaagaaagctccagaatcggttttgtaactattagttcatcccctgtcacctgccatggccttgaatcaccctcacaagacacagtcctagtcctggcactacccagggaatgcccttggttttctgaatcccagttaggactattagagggaacagacaaaaacaaaggaagtgaaatgccctcttaccacttccagagatgagagttaacactgagtaactgtcaccaaacactcatcatctctcgtttctttgtgttacacacacagaagccgttcaagacaaatgcagctcggtagtccgaggtccagttttccagctgcctgcaaaagccacccacttaccagcctcgtgatgtagagtgacaaacaaaaaaggtatttaaaatgtgcagaagcaggtgtttccaagggagcctcacccatttttacttcctgttctaggtatttaaatagtggctgtggcagagttcttagagataacaggaattaaaagaaaaaaatgcccttccttcaacacactgtttccacactgtttccaagcagcagaaaagtggattaactgttttctgcttctcaggttttctggccttctatcaactaagattaaaaaataagtccagctgggtctacatttatgaaggtcaacttaaactaatgtggaaagagctgccaggtgcttttatgtggtgtggagggttatctgccatgaatttagctgtttgctttctctgagaagtggaacatcatgtcaggaaagataagagaggttctcagccgaggctcatctggccttcgtctcttgggattcggctggatgaaaaccctttctgccatttattaagctttttcttcaccgctccacgcacaaagaatccttaaacctggtcgggcacagtggctatgcacgtaatcccagcactttgagaggccaaggcaggaggatcacttgaggccaggagttcaagaccagcctgggcaacatagcaagaccgtcctctctcaaaaaaaaaaaaattcatttttaatattttttgttcattttttagttattatatttactcatgaacccaaactaagacaaaacttttttaaattagcctggtgcagaggcatgtgcctgtagtcccagctattcagaaggctaagatgggtggattgcttgagcccaggagctcgaggctgcaatgagccatgattgcgccattgtactccagcctgggtgacaaagcgagactccatctcaaaaaaaaaaaaaaaaaaaaaaaaagaatccttaaactagtaatatttacacatatccaggcatatcttagatatctgtcacccaatgccagggagctattattagtttgggtgatgtttggctgcaaacactttttcatgaggaatttgaaattctaaggtaaccctccaagaggcagtagtcatggctcacccgcaaagccagttgcattgagtggaactttcttaatgagaccatgtctgatgacagcttagctgaacccctatgtctccttgaggcttcactccccttcctagtcccatattcctcactttcaaaatctaaagaaaagtcgatgagtaactgcatccaaaaattaggtaatcccgcatgaacactaggacaaaacaaacccagaatgcagaaattattgtcacataaaatgatcagtgttaccacagagttcatcagaagatggggccttgggatgttgagccttggactgcacatcacaccagctaacctttgtcccgtgtaccctgtgtcgatagccctattcttcacaggaagctggagacccaacatgctgacatgtttcatagcacacagagattcccgctgtgcaccatgatggggcccaacaccatctcggagtaaagcagagagaggactatgacaaagtgattgcccacccccacctcccctccctggcaggcaccactgaccttgatcaccaggtacaaaaacaaatcagcttggaagaagagctgccagacgctaacacacagctaagctcagcactgagaagaagtcattttaaaagctcttccattccctgcccatcccttctgagcctgacaccctacatcctgcttcctgaatctagcttcatgagtgaacccattgtctggcacctccttcttccagaagcctagggttacaacacaccccattccttctgcccagaacatcagcccttaggctgatggagaccgagcaggagagacagggaacaacaggcagagaagctcacagatgtgcaaggagcaggctcttcttgggggaagggacaggttgctcattaccatccaaccaaacggaatcagaggctctggaccccaagaagtaaagatagatttgtgcttttgtggcagtaaggatcctttgatttaaaaataaacaatcacgccatctccttcacaaagccagcagagtcctgctccgatggctctgcctctcggctctgtgtgggctccctggtgaatgaaaagtctgtgtaggcaaatcggaaggccaaaacaaaggagcaaaatgaacaatctcctgtcttcacagccaggtgcacccactggttctgaatctggattctcgaagcaaaatctgcatgaaaggctgactctatcattggcaagtgaaagttgtgcttctttagcaaaaggaagggggggcctttataaaactgcccccctaaacataggggccacctgagcaggttcacaagtcagcctccatgtaagtgaagaacagcgtaaagcccttaacaaagggcttatgttcaagttaaacttaaggaaaaagcactgagacctgcacaaaggatgccctgaaatcacagagaaaggcgggccggtcgggaggaaaactcaaagactgaagcatatgaagaaaagaccatcaggctgtctgaacagccctgcataacacagcaatgttattttggctacaagcaaagctgaatcgtgtcactagaaaggatgccatgttcccctgtgttcagcttcgataatggtctcacagataattaattaatgccataagggagcccttccgaccagaaaggaacaggcagagtgggtgatgggagggcaggaaactaaataaatcaggggaaaagagaggaagcagtgagacttccactaccacagggtgctgccaacagctgttctggaaataagtcagcatcgtggagtgcggctcaaggccacgagaataaactcagagacagcagttatcgaccctgggtttcatcaagagctccttcactgtcaacatgagaaaggccccttgctcaagacaaggcatcctatataaaaagaattggtctttaggtcttgttaacatcaacctctagttctaacctacaaggctgtttgacgtaacagaggagcaaaaacttggatctccttgaaccacatgtgttctggaggcctcaacgtgaagttgaatgttaataggtaaataaataaatagattacaaatggcacagctgggccggatttaaggccgctctgtgcatctttaatcgagcctcattatttggaacaatgtagttggcgtgaccattgccaaacaagatccagacaggagagaaagaaaaatagcagcacctgcccggcacaggtaagaaagcttctccttgcattctccgtggattgtgttctgacaaaatggcagcaacactgagtgaggatggtacaaggtggaggggacataggtagctgacacatggccacattctgccccaaggtggctcctgcaatgggaagaccacatatacatctcactctttgtctataccactggggcagtttccaattacctgagaatgtaggtgatgcctttcacctggagtcctcgaaacaatttcaacgatgtctgcatccttaatgttttcccacaaaataagtgtgtccataagtctctttatgacacagccttctgttaccagtgacaccgtgatcagagccgagggaaacatggcaccagttttaattatatgagtcaactttgctggtagccaaaataacactgctgcattgggcattatcattcagtttagcagctttcctctcttcatgcacttccatctttgggttttcctttgctgcctctctcagctaccccccacctttctgactttctctgtgattttggaagaatgctgtgaactagccattgcaatggcaaggaaagcagtcaaggaccagcctccagctcacaccataatgacctaccttccctgggacactccacgcccatgtgtgcttcatgtgtaggtgaagggcggcacctggcctcagagcaaacaactctcccataaggtgactggccaggtcaagccagctggaggaaggaatacaaccccagcaagaggccactggtgcacagctgggccttctttcctgatagggggcaaggcaccaggaggaggcagagtgagcaaggcccccaagcctcccatgcaggactcccccgtgctccagcatggaagggtgagggcttcacctgggccctgggggcacagtgactgggctacatcccagaggtgcgggaccagcacagacactccctcccaggactccaaggcaggtgagcaaggacctcctttcccagcgcctgtgttccttctaacagagacaagcaggttagggagtgtgaggaaacctcaaggcaagggaggaattcaggggactctggcttgagggaggggagcgtcaactcaggagtccagggagactgtgtcaagactcctggttctctgcagtttttgtttgtttgggattttgacgataaagcactactggagaccagaagggcctagaggccgagaggaaggtgccggagcccagctgcactgaggtgggtgcaggcggcgctgggcaacggcgaaggacccccctccatccccgcctgcgtttgcttctgcaccccgtggacaccgattatcctaacctgtcatgtgtaattctggccccgaagccgcctggaaacattggctttatggtaaatcttcttaataaacaagattagcaggaaaggaggtgccggggactggaggttttatgggtttaaaacaggggcgtccgcctgggaaagcagcggcttccactccctcgctgccgtgaagctgccgccctccctttcctcccgcggctgccacggaggaaaaatgtcctctgatttcggcggcgctgcccgcgggggggtgcgggggacgcaggtagaagcgggtgcagcgggacatccgaggcccggcccctcgcggcacacgcggcggaacacgagcggggggcgcacccacgccggaccagggccgcgcgctccagggccaggggagtgccgagtggcggggctcggggcgtgaggcccaggagccggggtagaggcaggaggcggcgccggggaggaaactgaggcaggggcgcgagacctgctccgagcccccagtgaggacagagaggcgcgcgacccgtggccgggggcttgagacccagagcctgggggtgtcgcgctggaaccccgagacccccggagcccccgacccgctcgccaaggcgcgctccccactcactcactgaggcacccctccccacccgccccgtcactcaccgagacgcccctcccctaaaccccccactcattcattgaggcgccccttcccccacgccccgcattcattgaggcgcccctccccccacgcccccctctcattcattgaggcgtccctcccccagaacctctcagaggcgcccctcccccaacgcccccactcatttattgaggcgccttccctgcatgccccctcactcagaggcgcccctccccgcaaccccctcactgaggcgccgcccctcccccccgaacccctcacagaggcgcctctccccccgacccctcagggtggcgcctctccccacccagaccccctcacggaggcgcccctctcacaacgcccccaactaattcattgaggcgcccctcccccggcgccccccactcacccagacgccccgggagctgccggccgcgggggacggacgaaggggcggcaggcaggacgcgtggcggcagcagcagcagtagcagcagcagcagcgggagcggcggccccatccccgcggcctggccggcggcgctcagtccatggccgcgcgggaggcggcgggaggcggccgagtccgggcccagggaggcgcgcgccgccggctcctcccgccgcgcctctcgcgctcttgcggcgacgccgggccgagcttcagcaccggacagcgcccggccccgccccggccccgcccccggcggcagggccccgcccccggacgcgcgtccgccctcaggccacgcccccggccagccccgctcgccccggccacgccccccgcccgcccggctcccttccctccccactcgcaggcgccgcggcccggagccccacgcccggccctggactccccggccccggctcgcgcccctccccgctcggaacgccccgtccgccccccgccccgcgcgtcccctcccacctgcattcctgccccccgcctggccctccgatcccctccccgcctgccgccgctccccgcccggcccggtgctgggggtcgcactgtccctggggacggcgggggcctaagccgcgcccttggcccggacgggaaggcccgaacctactctgctggggacctgggcaggcggcctctacccgcggggccccgcgcgcgtcgaattaacgccttccaaccgtttctttaatttaaacgtaacgggccacttgcgcatcggggcgcgcggaggtggacccagtcgacctcccctgcagcgcgggcggcgcccaggctcggtcccaggaaagctcccggagggcccagggcgtgggctggggccaggcgggctctggggcagagcagggtgaggcctgttgcgggcctggtctcctcgccgccgtcccgcccggggtcctgggggatgtcgcgtgtcctcctcaggagacagtgccacttccaagaggtcctaagacaaagggggccagtaggggcctccgggtgggagggagcctgcgcttctccacagcccacctccctcacacgctaccccaggaccaccccctgccgggtccctgtcctggcgaccccacctgggcccccaacctccgcacctgcttctgccttggacagagaggcctgagccctcccgcgtgccttcctgccacgttctcattccaaggacatctgctcggcgccctgtgggttttctcctccatgcctggccaccagggccatgccttccgcgccccttaccagcctgggcaaggctggcacctgtggacagtgaatgggggctgggatggcagcggggaggttccatcgtagcccaaacatctgcaattcagagttggatattggggctgactgtcttaagtgccctcctcacggacacctctgtcctcagacctccgtcatctccttgctggggcccctcaccctcccatccttcaagaaagctcctctttgtttgtcgcagccacctgtgcccggagggggtggtgggtggcagcttatccttcacacccagacgcccaggggaccacctccccgtagaaagcaccttcttgcagaatgcggcagcatagaggtcacggtagctcccgggcagcccttccctcctacaaagtcaggcccgtgtgtaaacctgcggatcctacaaaaacagccgctggttgggagaaggatggcag

SEQ ID NO: 492 - DNA, 309696 bp, Homo sapiens
  source 1..309696: mol_type = genomic DNA
ataagaacatttgcgttgagaagccgccacgggaagagatgtgatgaaacactacacagaaagagggaggagcctccgggtaggttggagtgagtaggatgtagggtagccggcaggggagaagaggggcaaccttctgttccgtaatattgataccacccatttgtgtgtccaatttttgctggtttgtgacgtccttctagggtccatgagtaacccccaccccattgcctagctgggtgcctgactccccttaagtgctcagtagacgttgaactggacgggcgctggcgtggtggctcacgcctgtaatcccagcaatttgggaggccgaagcgagtggatcatctcaggttcggagttcgagaccagcctggccaacatggtgaaaccttgtctctgctaaaattacaaaaattagctgggcgtggtggcgcgcgcctgtgatcccagctactccggaggctgaggcaggagaatcgcttgaaccaggcaggcggaggttgcagtgagccatgatcgggccactgcactccagcctgggtgacagagtgaaacttcatctctaaataaataaataaataaataaataaataaataaataaaataaactttgaactgaacaggggcagctcttacatctgtccagtctcgggtttatgcagatagaacaagataaccacatcccacatgggaggccagtgtccacttgctcctttggaggaactactgggcatttaagggactcgttgaacacactctgtaggtcaactctgcccggagtggagggagctgcgcagaccgctggccctctgcacgggtttgcaactcggcttctggaaacagcgggagacgtcgaaggaggcgagaaggtgcgcgcgcccttctcaccaggccggcggatgctgggtggtacccaaagaggcgctcagatcactggagctggagctcagtcggcggtcttctgcgggaactgcacctatcccggagcatctctggccctcctatttcactgaactcgccttcctcagcaggaaagtgggaagaccgcttgcttccaggacggtgtggggaagggtaagagggctcagggaaagaccgtggaaagctcggcgcacaagcgagctggcatcaccggggattccctccggcccggtgggactccggcgcgcttgtagcgaggacccccagcccagggcagagcctaccctccgctcccccagtctgggcccttggcggccgcagtcgcccaagcccgccccgcctccgcgcgcggccctctccggctcagtgccctgcgctgccgggaagcaggctgaggggcgcaccgggcggcgggcggggacctggggaaggccgggagcgccgggaccgaggacgcacgcggcgggccgggccgcgcgcgcctcccccctcccccgaggcccgagcgcgagccgccgtgacgtcacgggcaacccgccagccccgcgctcctccgggcagagcgcgtgtggcggccgagcacatgggcccgcgggccgggcgggctcggggcggccgggacgaggaggggcgacgacgagctgcgagcaaagatgtgccccgggacccccggcaccttccagtggatttccttgcggaaaggatgttggcggtccctgtgacctgtggagacacggccagatctgccctccagtaagttccaattttgtcccctgcgtttctggaaactctcgagacttggccctgagtagggatgcgctgtgagtagtcggacggaggaaaggggctttcggaatccaatatgtgtgtgctaggcgtgcactgtcctcatcaccagcctcaagactggtggcgagtttgggcgtttggggagggtgaggggagggggatgacaccgaatggccggtgcatagaggcaattctggatttatgaacttgatcaaaggcatattaactaatttctaaaaatagacccctctgcagtcagaacagatttggagccatgatgtggtttggaggcccctctggcgaaactagaggtctgtgaatgtgtgatcctccctccatcctttgaccatcactccccgcttcctctcacaccccctcagggctgggcgaaggtgatttccaaaaactcagtaactccgtgttttgagactttctcagtttttgcatcgcatgtgagggtttgttgggtgctcctaaaccctcatcatggtcattcttcttggctgggctgttgatttaattaggtttgccttctcttgctaacgtgctcttatttatgccagtgtttgtggttctgggtgtagactttcaggaagcacagccatgaagctgcatgcgtctgtgtgtggatgcctcatgccttttcctggtggtttgcaggcatggaagattcttctgttcatctaagctcctgactttaggcccttctagaacattagagaggagaagaaatcacgtgcaaggatttagggacaagaggatgaggttttggtgtttcctttctggtattaggttttccagagagaggctgttagcctgtctctcgcccactccaccactgtgaatcctggctactggggctagttccttgctaggaaaaaaaaactctagagaaatgtgtttgtgtgtggtgggtgggcgggggccctgaggatgcagggactgtgtctgctgtgttgtctgttataagatgtttcagacctattttgcatactggcagcgacaagttgagacttgttcaacttgacacagtcctgtggtcatagcgaatctttctaaagctctgatcagtcaagaagggggttgtatcaatcctcagaaccctgagtggaactttctacaggatttattaggagaaaaaccttcccggaagctgcagaaggacaaatacagaatccgtgtctgggagaaacctcgtggcctggtctccattatttgagatgagttacatcttggaggtgaggacgtgcctcgtggtctaaagcttcggcacaagggcccaactggaattccacttacgggtatgactgtggggtatatgctgtacccattgaattcccagagggatttgttaagtggttgtgttgctgttttgcctggttaagagtggcttattcttgttgcctcatctatcttgagtgcagaatttttgcataaacggcttctcttgaaaaatagaagtccgtttttgttttgttttgttttttttctgattaactttccttttcctctgtcttaaacaccttcccccgcccctcgccacctccatgctgtgtttctgtggctggagcttttctgcactggaaaggaggagttctcccctctgttctgacatatctgatccccactagtttatatgattgctggtctgaaaacctggtgaattctcactgcccacatcaaatcaattccctgttctttagttgttttttttttccgcctcctgagcggtaggcaggcactctggctggattctggagcctgtgtttgccatgcctgggccttctgcctgcccaagatggacacgtttctctggcagctttgtcaagagatctcctggactataagacaccctgttctttcctcctgtttgtgtgagtggccctgcatttgggcagagtattggcagaatatctgggggaagtggaagactttggatagttgccggtccaggtcgtctggagaggcagtggcaggcctgctgatggctgcccctttgctatttgttttatatcaggtggcccttctggatgtgtggcctttttattttgcatttcctttcatagttggctgcagacataagattcttctttttctcttgttttgcttttttttttttttttttgagacagagtttcactcttgttgcccaggctggagtaaaatggctggatttcagctcactgcaacttccgcctcccaggttcaagcgattctcctgcctcagcctcccaagtagctaggattacaggcatgcatcaccacacccagctaattttgtatttttagtagagacggagtttctccagattggtcaggctggtcttgaactcccagcctcaggtgatccgcccgccttggcctcccaaaatgctgggaggcctcccaagttgctgggattacaggcatggaccaccatgcctggctaattttgtatttttagtagagacggagtttctccagattggtcaagctggtctcgaacatctgacctcaggtgatctgccctcctcggcctcccaaagtactgggattacaggtgccacagtacccggccttgttttgctttttattgtttcctgatgcaggtttgtgatctctttgagggatcaggaccacaccccccaccccaatttatattcccagtgtccatggtgggaccctgactgaggatgggaacagagcaacaatctggaatcatttggaccattgagtcctgtggacagtcacttcaatatcatccctagagagtctcagaaattcaaggccttttggaatgctgccaaaatgggtcctttggcaggagccccctttgtctcttctgttttctgacctcaaataatctaaggaactaataacggtaataaataacaattaataataagaacaataatagtgcatgtataacatggacattgtttatcacgcaaagcatgttcttcaccttctactccctacaactccatgaggcatttataatgaaatgtctagcaatggtagacttcttgttgtggggcagggttggttctaacacttcaaattatatgatctcatttaactttcctataaaataggatgattattgttgtggttttgcagatgaggaacccacagcccagagaggttaaaaatatcctcccaggtcacacagcttgggagaggcagagctgtagagatttggaccacagtcttcgacttcttagtgtgactctcagaagttagaggataatgaggttaagaacaagcaaagggccgggcgcggtggctcacacctgtaatcccagcactttgggaggctgaggcaggtggatcacctgaggtcaggagttcgagaccagcctggccaacatggtgaaacccggtctctactacaaatacaaaaaattagccgggcatggtggcgcacacttgtaattccagctacttgggagtctgaggcaggagaattgcttgaacccgggaggcggaggttgccgggagccgagatcgcaccattgtattccagcctgggcaacaagagcaaaactcagtctcaaaaaaaaaacaacaagaaaagggtataccccttggccttgagcaggagaacacagtgtgtcccccaccctcaccgtgcaccttaggcacaaacagaaagctgaacatcttgcatgaagatacctcatgctctgcctgccgaccttttctgcagccacggagcagtcagagacaaaggggccaagaggccttaggtgagggctgccatgctggaaagtttgggctgtgggtgtgggcaggagtcatgggtagaggtcagaacccttagtcttggctgggtgcagtagctcacacccgtaatcccagcactttgggaggctgaggccggtagattacctgaggtcaggagttcaagaccagcctggccagcatggtgaaaccctgtctctactaaaaatacaaaaaaaaaaaaaaaaaaaaaattagcccggcgtggtggcacacgcctgtagtcctagctactcgggaggctgaggtaggaagatctcttgaacccgggagacggagtttgcagtgagctgagattgccagtgcactcctgcctgggagatagagtaagactttgtctcaaaaaacaaacaaccgcctcggtctttgtgcaaaatctataatcatttgcaagaggctgcaatcaggtatagcactggattttgtgaccaaaactaggtttcaggatttaattaaaaacaaaaacaatgtcaggtcataaaacacaagacatatacatgatgtggaaatggtcttattcattttttaattgcgaaattccgaactatctgttttttttttcctttatcttttcctttttgtgtgtgtgtggagttaggtggggggggaggtatggcatattgttttgtttatctgcctctttattatcactgactgtgaaattcttgagaacaggggcgtctaagtgcccaacacagccctggtactttgttgaatcaggtggctgtcaagagctgctgcttcagcccggcatggtggcttatgcctataatttttgcactttgagaggctgaggcaggaggattgcttgagctgagaagtttgagaccagcctgggcagcagagtgagactctgtctctgtaaaaaataataaaataaaaattaaaaaataaagaaagaactgctttgtcttcaaggaaacaagatacacagtcaacagtcattatctttttagatatgagacagcttgacatggtgtggaagtggggggcttgcctgtagggaaagtatgctgatgaaaaagaaggaaaacagacagtagcaggaggcagtggggatgtgtcagggagctgaggagtgtagatctggttacttttgggcaagttacttctctaagcttcagtttcctcatctataaaatggtttgctgtgatgacgaaagagatgatgaacagaatgtgtctggcagaggacctgggctcataagtgagcacacagtaaaaggtagctaatatcattactgttccaattattgagctttattacttcctgtggctgcatgaagtagtggtttctgaatagaaaggcaacattctagttgcctagatcttaagatggcagtgacttcactgtagttctctgcaagcatcagaaacaagccctggcttatgtaagttagaaacagatgagaaagtaaataaagctgcagaagtgggtctcaggaaggacaggaatcaaagggctgtccctcggatgtcagactgcctttgcaagttacttcaggtcactgtgcctccatttcctcagctgctgagcaggggaggagaatcacttctccctccctgggatggtgcagagcacttagcagagcacttagcacagaggaataagcccttcagtaaaacatttgagtaaagcaattattatttattattcttcagggctctttttttttctggtgcattagccctaacattgactacttggttcaagagtgatggatgcattcatttcctgagcagttgctgtatgcctggcaccgttttagctgctggcgatccagcagggagcagaagagacaaaaatccctgccctcctgaagcttctgtcctagtggatgtcacacagtagtggggcaggctggtccccagagacagctgggggacagatggaggcagtgcaggcaaaagctaactcctgtgcaaagtctccccggccccactgtgttaacagtaaagtgcttagcagaggctcccacacatagtagttactatgtagtggtagttgctatgtttattattattatattattctcctccctcataaaatggcagcctccctttcttccattccccttcctgagttattttttctcgatagggcttatcttcctagtataccatatgtctctcttctcccactaaattgtaacccattcatttttccaggatatatttgttgggtgtctactctgtgcctggcattgctgtagatgttggggatgcagaaaggaagaaaaaggacagatttccatgctagagcttaggttacagctgggttagacagataaggaacagcagacataataaagaaggacatgaattgtgtattcaagattatgaagtgctgtgggaacaggcctagcagggtcagtgtctggagggctggggcgtggtgctgtgtggttaagttgtccggtcagagtcagggcaggctccatggaggagctgacgttaacctccacctgaagtaggggaaggacaggcgtttcaggctctgggaagagctaggacagaggtggaggcagaagtgagcctgtgggggtgaggagcagccaggagaagcgtgagatgagaatggcgtgagcaagggaggtaggagaacccgagcagcatgcagtgtgcagcctcacagagagcctgcagggcattccaaagattctgtcttttactctgtaaaatggggagcccttgcggtgttttttgtttttgttttttgtttgttatgaggcagagtcttgctctgttgcccaggctggagtgcagtggggagatcttggttcactgcaacctctgcctcctgggtttaagcaatccttacacctcagcctcctgagtagctgggattacaggtgcgtgccaccacgcctggctaatgtttttatttttgtagagatggggtttcaccatgttggccaggcaggtctcaaactcctgaactcaagtgatccacccacctcagcctcccaaagtgttgggattacaggtgtgaaccactgtgactggcttccttgcagtgttctaaaaaggaaagtaatttgatctgacttggcttttgaaacggtcagtctggctgctgtgttgagaagaaactaaatcagggtcaggagctagagcaccaggacaaacatgcacagagcgttaagtgccaggtccaggctggcagtggtggatggggccacaggaatggacttctaggctgttcactgttgtatccccagcatcttaaactgtgctctccatatggtagctgtgagccctatgtgggtattgagcacttgaaaggaaattgatatgtactgtgtgttaaacacacattggatttcagagacttagtgagaagagtaagatatctcattatttatttatttatttatttatttatttatttatttatttactgagacagagtctcacctgttgcccagcctggagtgcagtggcatgatctcggctcattgcaacttccgcctcccgggttcaagcgattctcctgcctcagcctcccaagtagctgggattacaggtgcccaccaccacacctggctaattttgtatttttagtagatatggggtttcactatgttggccaggctggtcttgaacttctgacctcaggtgatccatcccactcagctttccaaagtgctggaattacaggtgtgagccactgcaccaggcctatttgtttatttatatgagacacggtctcactctgtcacccaggctggaatgcagtgatgtgttcatagatcattatagcctcgacctcccaggctcaggtgatcctcccacctcagcctcctgggcagctgggaccacaggtctgtgtcaccacgcccagctaatttttttgtatttttggtaaagctggggtctccctgtgttgcccaggctggtcttgagctcctgggctccagcaatctgccttcctcagcctcctatagttctagggttacaggcgtgagccactgcaccctgccaagttatctcatgaaccaattctttgatgttaattacatattgaactgataatgttttggatatattgggttaaattattaaaattaatttcatctgttttttctaactttatggctactagaaaatctaaaattacatgtgggttgaatcatattttcgctggatggaacaatgccttggacgaggtcagcatttagtgaatcaaatgtgtgggtgaggcacaggtgttctgccgtgaatgagaaaccgttgccatcttcgggaagtttccagtgtgggagggaggcacactgcagatgtaactgctaggagagaaagaaggcaggttgaaatgggaccacagccaaccaggcctgctgtagcccagaagctggaagagactcgcccaggagggaaggaagacactggggtgttgggtctcagtctgggtcttggtgacagcagtgggctggcagtgcagaggttcaaggccttggactgcaagtccactaaggtggctggtggtgtgggtggaggtggaaaaggcaggtggggcgagggtgaggggcaggacatcctggagagcctgaataaccaggtataagtgatttctttttctttctttctttctttttttttttttttttttttaagacggagtctccttctgtcgcccaggctggagtgcagtggcgagatctcggctcactgcaagctccgcctcccgggttcacgccattctcctgcctcagcctcccgagtagctgggactacaggcacccgcccaccacgcccggctaagtttttgtatttttagtagagacgaggtttcaccatgttagccaggatggtttcgatctcctgacctcgtgatccgcccgccttggcctcccaaagtgctgggattacaggcgtgagccgccgcgcccagccccaggcggaaattatttcaactgggtcctgagaactgggcacttttcaaggattgtcagcaaggagcaacttcccaaatatacatctaaaaagatgacaaactcatgtggaatgtggatttaaggaggaaggtacttgacttaagaattccaggattttggtggaagaaggaaatatgggccaggcactgtggcttatgcctgtaatcccatcactttgggagatagaggtgggaggattagttgagcccatctgagaccagcctgggcaacatagtgagatcctgtctctacagtttttttttttttttgagacggaatcttgctctgtcatcaaggctggagtgcagtggtgagatctcagctcactgcaacctccgcctcctgggttcaagcgattctcctgcctcagccttccgagtagctggagttacagccttgtgccaccatgcttggctaatttttgtatttttagcagagacggggtttcaccatgttggtcaggctgatctcgaactcctgaccttgtgatctgcctgcctcggcctcccaaagtgctgggattacaggcatgagccactgcacctggcctcaaaaattcttatttttaattaactgggcttggtggcatgtacctgtagttccatctttggtggcacgcacctgtattcccatctacttgggaggctgaggcaggaagcttgctcgaacccagaagtttgaggctgcagtgagttatgattacaccactgtactccagtctgggtgacagaatgagaccctgtctctaaaataaataaataaatttttaaaagctgggaggtggggttggtaaattcataaaaaataatatttcttgagttgaatacaaacaatacaatcactgttttttctttgccttgttttatttttacttatttatttatttttgcagacattgggcctcactcctaggctggtctttaactcccggcttcaagtgaccctcccactttggcctcccaaagtgttgagattacaggtgtgagccactgtgcccaggctgtggttttttattttttaattttttatttttttgtattataatcatagtgtatatgttgcatcctgattttttttttttttttttttgagacagcatctcattctgttatccaggctggagtgcagtggcacaatctcagctcactgcaacctctacctcccaggttcaagcgattcttctgccttggcctccgagtagctgggatgccaccgtgcccggctaaattttttttctttctttctttttctttttttttttgtatttttagttcagacagggtttcaccatgttggccaggctggtcttgaactcctgacctcaagtgatcccacctcggcttcccaaagtgctgggattacagcgtgagccaccacatctggacacatcctgatttttttcttagttgctattaggacacaggcatttttgaatattatatgcactttgtccatgtcttttttttttttttttttttgagacggagtttcactcttgttgcccaggctggagggcaatggcgcgatctcggctcactgcaacctctgcctcccgggttcaagtgattctcctgcctcagcctcctgggtagctggcattacaggcgctcaccaccacgcccggctaattttgtgtttttagtagagacggggtttctccacgttggtcaggctggtctcgaactcctgacctcaggtgatccacccgccttggcctcccaaagtgctgggattacaggagtgagccactgtgcccagccgtccatgtcatttttattgggtagatatttctgttcagtgactgtttcgttgcttactttatcattcctttgatttggatgcttagcttcataacagcctgtttatatagattatgttttctatttttcagttaattaaaaaaaaaacaaattctcagtcctaggattattgtgcataatgtctgaattttttagaatttcaggtaaatattgtggttcatgagatttgcacagaagctgaatttgctgctttctggtgaggcacgtgatgttttttgctgtccgtgatgcactaacatgtcattaacatgtatgtacagtgttatatgctcgcacatgtttatgtgcagcctatgcacctgtattggatttttcttcactctcatttattggcaggtatttgtggaatgcctgtggtgtgccaagttctgcttgaggccttgggtattcagtagtgatcaaagtagatcaactagtaccagttcttaagaggcttattgttaagtgggggaaacaagcaaatagacaaagaaaaaataacattattgtaaggaatatgaaataatatgtactagaataatatgaagggatggttattgtgaggtaagggggttcatactgaaatactgtctgaggaatcaggatttgagtgagacacgaagactcagtagaagttaaccagaagaacaaagtgttagcagaaaagacaagattgatcaatatgactacatattaaagaaaaaggcacatctaagcaacaaaaactgcaatggtattaaaagccaaatacaagacttagaagatatttgcaatatttataacacattacaaaacactaatatctagaatgtatgcagaattcccaaaagtcaacaacaaaaagacaaacagccttatagcaaagtgggtgaaagataggaccatgcagtgctcatagaaagcaaagtagatggctgggcaccgtggctcatgcctataatcccagcactttggaaggctgaggcgggcggatcacaaggtcaggcgttcgagaccatcctggccaacatggtaaaacctcatttctactaaaaatacaaaaattagctgggtgtggtggcgtgtgcctgtagtcccagctacttgggaggctgaggcaggagaatcgcttgaacctgggaggcataggttgcagtgaacccagatcttgccactgcatgccagcctggacacagagaacgactccgtctaaaaaattaaaaaaaaaagcaaagtggatgataaatgtgaaaagattctgaattttgctaacaaagtcaggttttggagatctaatttctagtcagtaaaattcatcctttctaggatacaatgctaagagttttgataaatgcatagaactgtgttacactgttgtgtaattaccacaatcatggcttagaacatttccatcgttcacccagattccctcctgtcccttcacagccagtctccttctccacccccagctttaaccaacccctgagttgtttgctgaccttacagtgttgcctttttcagagtgtcctataaatggattcatacagtgtgtagtctctcggatttgtcttctttcacctggcataatgcattcgggacccttccatgttgttctatgcatcaggggtttggtagtttttattgctgactgggactctgttgtatggatataccactgtttgtttatctgttctccatttgaagagcatctgggtgtttccacaagatacatgtttcatgctttacaacgtgccagaaataggatgtctgactcaagtgttgacaaggcacagggtgttcagcagctccgctagtgagtgtgtgaggtcactttagagaccaccttgccagcaggtagtgaaattggaaacatgtgcagccccgttcctaggtaagattgagaattcacagttcgtgctgtatgttacttaaggatatttagagatgaaagtgaaggtttaaaaaatgggctggaaagatctatatcaaactcactgtcatcatctggggagagaaggggagtgggctgattgtgaaggtcaaagcctactttaactttgcctttattgctttttttaaattcaattaattaatttacttgtggggacagaatctcactctgtcaaggttgctggagtgtgagtggtgtgatcgtggctcactgcagcctctactttccaggctcaagtgattctcctgcctcagcctccggagtagctgggactacaggtgtgagccaccatgcctgtattttttgtagagatgagatctcactatattgcccaggctggtcttgaactcctggcctcaagccatcctcctgcccagttctcccaaagtgctgggattacagggaggacccagtgtctggcctatctttaatgctttttttgaaaagaaggtggatacctacacatatcacttacacagtttgaaaatatgtagaaaagaaaaaaagtttgaaaatacatatgacaagatgttcatggttgtcaattctaggttctttgaatttttctttttttctttttttttttgagacggagtctcgctctgtcacccaggctgggagtgcagtggcgccatctcggctcaccgcaagctccgcctcccaggttcacgccattctcctgcctcagcctcccgagtagctgggactacagatgcctgctaccacgcccggttaattgttttgtatttttagtagagacggggtttcactgtgttagccaggatggtctcgatctcctgacctcatgagccacccgcctcagcctcccacagtgttaggattacagacgtgagccaccgggcccggctgagacagtcttgctctgtcacccaggctggaatgtagtgaagcaatctcggttcactgcaacctccacctcctgggttcaagcaattctggttcctcagcctcccgagtatttgggacttcaggcacaacccccgtctggctaatttttgtattttttttagtagagacagggtttcaccatgttggccaggctggtctcaaactcctgacctctggtgatctacctgcctcagcctcccaaagtgctgggattacaggcgtgagccacggcgtccagcctgttctttaaatttctttcaaaacagtttagggaagggatatcctaggtaaagataatagcatgtgtgaaggccctgaggctgcaaaacttttggtgtgttcagagtgtcaaaagattcgtgtggctggaaaggagtgaacgtccagggtccagatgaacaggtgtttggtcatggagggccttaagtgcttttttaagtctttgggggtggctaagctgggtggttcctgatttgattgacctttttgttgggtagatggtggatcaacggaagcaggtggcccatttggggactgaattacagcaatccaagagagagctggactcggctctagcagtggagaggaagagaagaggatgagtttggtatttattttggagacagaaaggacttcttgggaccaggcgtggtggctcatgcctgtaatcccagcactttggcaggctgaggcgggcagatcacttgaggtcaggagttcaggaccagcctggccaacatggtgaaaccccatctctactaaaaatacaaaaattagccaggagtggtggcaggtgcctgtaatccgagctacttgggaagctgaggcaggaaaatagcttgaacccgggaggcggaggttgcagtgagctgagattgagccattgtattccagcctgggcaacaaagtgagattccatctcaaaaaaaaaaaaaaaaaaaaaaaaaagaaagaaaaaaaagaaaaagaaaaggacttcttggagggcaaagtttgagggaagagttagctagctagagaccttccaaactgtgctcaggcatttggattttaccctgtgggtgatagggaactattgaaagttttcatttttttctttttggagacagagtcttgctctgttgcttcaggcaggagtgcagtgagccatagtggctcattgcagcctggaccccctgtgctcaagcaatcctcccacctcagcctccagagtagctgggactacaggtgcatggcaccacccccagctaatgttttgtttttaattttttataaagatagggtctcactttgttgtccaggcttaaaactcctggctttaagcgatcctcccatcttgacctcccaaagtgttggaattacaggaatgagccatcatgctcggctctatggaaggttttgaggtggggcagggatgagattagagtgatgtgcctttgccagagagatttgtccagaggaagggtgaccagcctggagtctctttggaatgttctaggtaatgtagcagagattgtgtcagttaccctctggtgggatgcttggcttttcccattttttcaaaaggaaatgggaaaaggaaaaggtcctctgtatggaaagtccccaggaatttataggagagtggctaacgaagacagagttcccttccggcatttattgtgactgagtttgttccatagttttagtcccacttaggtcatgattcatcccactgggccagcagcagcattgggatcacgtcagccaatcttcgcacttagagattttgaagagagatatctcctatccatgtggtacattgcttttcacaaaacaaaagagttcattttgtcggtgaaaagccctggccagacccagccggtggagaccagtagcttcctctggcaggctgggcttcctatggtcattgcagtccctccccatttataaggctgccttccctgagaacacctgggacagatgccccccagaagcatgccctctggaaagggagaggagcaggagggggcttcaggcatgctgggcctggggggccaccccctggcctttgctaagttcctggctggtctgagccctcttctttcctctccccaggccttgcaaaggccatatctcttccttttcatgactctggaaattccatacatactttctgcattaggaagacattctctgcatgctgatctcgttaaaaaggaaaagccaaggagcatcctgcacctccctcctgtaagcgagctttgcaaatggtaaactagatcctgaaaggcaaccacttaaaagcttttaatggcttcccattattagcttgagtgcctggtgcgtcagaggctctcagtgagcgtgtattgaattgctgaatgcatggtggccctgggcgaggaatctggccctcactgtcccaaggctgagtgcctttgccctgtggaggaaagcactgccttggggtcagaaataaggattggcaggattgcctggggttagaaatagtgatcatgggatcagaggcagcaggtgaatgtggggtgtgaatatttttgaaggcttggaatgaaatgattcttccagactttagaggatttgtgtctgcagattcttctctaaggtttgtgtctcacatagtgagagaatcagccagccagggaaatgggacaggattttgtctctttccccatttcctcttctaatgaactcctacctatgctttatgactgcattaaggggtcacctcctccaggaagcattccctcatctccttacgctggttctgagtgtgtcgttcctgcttgatcccctcccagcaccatgtgtgtgagttctcacagctcacaccccatagtattactatgttgtttctacagtgggttcctgtcaggggttccaaacttagctgtttaggaggatgagtagattgtacaaccacaccaggcgggcctgatcaaatacagtaagaagtgtccggattggcaaaccagcgggtccctcttctagatgttatcagagagatactgttagagagaggttgctagatgttaatagaggctgctgttagattccagctccctcctcccctggtcccttttctctcctcatgccaaaagatagacccagtgttgccagagcttccacttttaaaagagaagccttttaaaatataaactctcctgatttttaaatgttttcagttaagtttttaaaggaacattcataggccaaaccaaatacctgtgggccgtatgtggcccccggggccagcagtttgcagctccttggttataggtgcctctaacccattgcacaagctccctcaggcatttcatgtctttcctttccattccccctgggcctagcagggagctggcatgtcacagtgggtgctccctaattattggttattgacttgaatgctagactgagcaagcacctccctgctcacagggtgttaacatttttccctcagaactgtttgtatgtaatgctattctgaattgcttcagttccttacatactttagtgatagtctgtatgtgcctggaaaagtcatcattccttagattctagacaactctgttcttctgttcttttcctttttcctttctctctccgtcccctcaacatatgtttttgttttttgttttttgccagttcttttgtatctggccggttaacacagggcttcataacatggggtcggctgttattaagcaacagtggtttccggtagctcactgactttgccctctctgctggtaagccattgctgatttccatcagggtaacaagcatgattttcagatttaccttcatttgcagtgaacaattatagcaaaattgcttaaagaaatgaaccttcaggtgtggcggctcgtgcctgtaatcccagcactttgggaggccgaggcgggaggatcacttgagcccaggaggtctctaggctgcagtaagctgtagttgcaccactgcactccagcctgggtgacagggtgagacatcgtctcaaaagaaaagaaaggaaaagaaaagaaaagaaaaggaggggaggagaggggaggggaggggaagagggagagagggagggagggagggacggaggaaggaggaaaggcaggaaggcaggaaggcaggaaggaaggaaggcaggaaggcaggaaggcaggaaggaaggaaggaaggaaggaagagaatgaaaggctgggcgtggtagctcttgcctgttgtagtcctggcactttgggaggctgagatgggaggaattggaaaccagcctgggcaacataatgagacttcatctctacaaaacaaatttttttttaattagccagtggcatgcacctgtggtcccaggaggccaaagctggaggattgcttgaggatgggaagttgaggctgcagtgacctatgttcccaccactgtactccagccagagtcacagaacaagaccttgtcaaaaaaagaaaagaaagaaaaggagagagggagggaaggaaggaagaaaaaaaagaaggaaagggagagaggaaggaaggaaggaagggaagggaagggaaggaagggagggaagggaggaaggtaggaaaatggaaggaagggagggaaggagggaagaaaagaaagaaggaaggaaaaaaccggtcggctatcttgacgaaaaaagtctcagtccactccattttgtgcagcatttcccgtcttgttatctttctggaaaaactcagtaagtctctggctgggaattatagaagcttaatatgcacttgtaactgtgtcaggctctcacagggaacaaacaagaggaactatagatttttatagtctgcaagagcccagtccatgcatttaggaggcacagagtgagagaaagagcattgacaatgataatatagcattaatataggtacaatctggagtaatgttatctagtactactaatagcgatattaaaatggcattatatagatattaagccctgacttcgtgccggtttgaacttttcctgtattaattcatgtgaatcaattttgagactctgtctcaaaaaaaatatatgtatataatatatacaaatatatataatatatacaaatatatataatatacaaatatatatatataatatatacaaatatataatatacaaatatatataatatatacaaatatatatatataatatatagatgtcatggtgatgggaagactgggggaggagaggagcagtttaatcccaggatcccatggagaggaaacttgtaggtctcttacccagtgtcttctcctgctctctggctctgatttctgaactaagaaaagtgtgcaaacatcatctgctctcctggttgtatttgtaaatgcctcccctagacccagctctactttaggccacgtgagtgacagtgaccacatcagtcagggattctcctactgtccctgacccatgtccgcttttgtctcctcccactctaataacagaccgtgtggcttgaacctcagccctgctgccaagtagctgtgtgagcttcagagcctggtgcctcagttccctcatctgtaaaatgggaatacaaatggtccctgtgtgtttgggtattcaagaaaattaagtgagttgctgcacacctcacctctggctccttcaacaaaaacatggtcaccctcaaaccaaacgtgaacaggagggtggtgacgcaaaccacatggaaacgagaggcagacccaggctggagtgcaattgcacgatctcggctcactgcaccctctgccttccaggttcaagcaattcttctgcctcagccttctgagtagctgggattacaggcacctgctgccaagtctggctaatttttgtatttttaatagagacggggtttcgctatgttggccaggctggtctcgaactcctgatctcaggtgatccacccgccttgacctcccaaagtgctgggattacaggcatgaaccaccgcccccggccgcagatgggaaattatttttgcactttcagttgtcctaaatctagagttttcctttatccagacagctggtgaaagtggacgtgagaatagagagatttcctggtggggaagacctccatcctccttctccagccccttcctcattattcccaagaaaagagcttctgggtttctgggagaggctgagcaggtggagacacctgggccatatctgggtctctccagaatccaggagcctgcctgacgcgtcagccggggagggtttctgtgtgaagtcggcttgagtgagccagcctttcatgcatccttgtctttatttcttccccagctcaggaggggctgagttgtgtcttaatgagcagttccagctgcacgctgggcatctcctaatttactctcatttatttagctcctgctgcatgctgggcaatgctctaagtgctctgcaggttttggctaatttaatctccctagcaaaccctttgaggggactgacaggatgaccatcctcattttacagatgttgggattgaggcacagacagtttatttttaatttttatgtgtaaaatgtttttactgtggtaaaatttacataataaaatttgccattgtaaccatttctaactgtacaattcagtggcattaaggccattggtattgttgtgtaaccatcaccgctaatctaaccatctccggaacatttttcatcattccaaactgaaactctgcactcattaaacacttactctcctctccccctcccctcatcccctggtatccacagtttctatgaatctaactaccctaagcatccgtataggtggaatcatagtattcatccttttgtgactggctcattacacttggtgtaaacttttttttattttttatttttttttgagacagaatcttgttctgttgcccaggctggagtgcagtggcacaatttcagctcaccacaacctctgcctcccaattcaagagattctcctgcctcagcctccctagtagctgggattatagtcgtgcaccaccacgcgtggctaatttttgtattttttagtagagacggggcttcgccatgttggccaggctggtctcaaactcctgacctcaggtgatccaccctcctcggcctccctaagtgctgggattacaggcatgagccaccgtgccccaccttagtgtaatctttcaaaggtatatctccgttgtagcctgtgtcacaattttatgcccttttaagactgaatgagtttttaaattcattcccatttaactctttgttttgttgcctgtgcttttggtgtgaggcacagacattttaagaaacttagccaaggccattcaaccagaagtggcagagcctggatcttgaccacatggctttgctgctcccagagtcttgaccctgtgctggggctgacttctgcttttacatgagttcttgtcagtgctttcggcagcttgatcaggtagatgctgcttttccactttgcaaatatggaagggagcacccagctctcttgggcatggcagaaattcatcaggggcggaggaggcacagggtacccacccaaaaaatcccaacatattgaatcaccttccaataatctatagcatcatttatgttatgctgcccacaacataaatggctagcaaataatttggatgcgacagaattggtgaatgaatttaatgtagcttcaacctgaagaccattatacactattaatacctacaaaattatagatgtaaggctgggtgtggtggctcatgcctgtaattccagcactttgggaggccaaggtgggcagataatgagttcaggagttcgagaccagcctggccaacatagtgaaaccccgtctctactaaaaatacaaaaattagctgggcttggtggcacatgcctgtagtcccagctactcagcaggctgagggaggagaatctcttgaacccgggaggcggaggttatggtgagctgagatcacgccactgcactccagcctaggcaacagagtgagactccgtctcaacacaaacaaaattatagatgtcacctacaggccagttgggaggcatattggtaagtaaatacccatgacctctccaccctgcctaggatccaaactatgaacactgatggttgactctaactccatattcttttcagttttctcccatgcctaccccctgcccccgagcattctccctcattggtggccctgattttctttttgttgagataggatctcactatgttgcccaggctggtcccaaactcctgggctcgagagatcctcttatctcggcctctcaaagtgttgagattacaggcgtgagccgctatgccaggccaactcttatcttgaatgttgatgtttatcatgtcatggatgaaaaaaaaaaaacccatgcgtattcttttttttttcttttttttttgagatggtgtttcgctcttgtcacccaggatggggatggagtgcaatagcatgatctcggctaactgtaacctccacctcctgggttcaagcgattctcctgcctcagtctcctgagtagctgggattacgggcactcgccaccatgcctggctaatttttgtatttttagtagagatgaggtttcaccatgttggccaggctggtcttgaacacctgacctcaggtgatccacccgcctcggcctcccgtttgtattcttaaatagtgtattgtttcctttacttcctttagagctttacagaaattccatgctgccttcagcttcctttgccgctctgcatcatgttggtaagtctctgctgatgcctgctgctgtagcttatttttcactgtgataatctgttccattgtgtgaactgaccacagttgattgatctgttctccaaggacatgtgagttgttcgcaggtgtccccccaccccctcccgatacaaacagtgctgctgtggacatttcatacatctggttgcctatgtcagaatttccagggtatacagctaggacgcagtactgctgttggattttcctgggattgtagactctcaaatttggaatggacttctatggccaagtagttcaccttcagcaatcatctcaaaagaaatgctcttggtgtgatggttgagagcgctgttctggaataggagagacacagacctgctgggcctttgcctcattttattacttagttcattatgcaatgaacttaacatctgtctacctcagtagtttccctgtctgtgaattgagtctgttacatatatatatatctatttaaatatatatatctatttaatatatattaaataatatatatttaaatagatatatatatattacagactcaatttaacccttagggaaatatatatatatatatgtgtgtgtgtgtgtgtatatacatatatatttaaatagatatatctatttaaatatatatatatatatatacacacacacacacatatatatatatatttccctaagggttaaataagatagagacctggtatggtggctcatgcctgtaattccagcactttgggaggctgaggcaggagagtcacttgagctcaggagtgggaaaccagcctgggcaacatagttggaccctgtctctacaaaaatgaaaaataaaaaaaaaaaaattagctgggtgtggtggcatgtgcctgcagtcccagctactagaggctgagatgggagaattgcttgagcctgggaggtcgatgctgcagtgagctgcaacagagtgacaccttgtctcagaaaaaatagagagagaaagatccggcatgtgtagagattaactcggagcctggaaataataaacacagagtaagtgctccctgctgttcgccttgttcctgttggtgtttaaagatcacttacacttgcagaggcagaactgatgcccaggagaggggcagtaactagcagaagggaaacagcccgggtccagtttacttcccctcaacgtgggccaaggacgccaggcaggatcatagtccggctggattgtggctttcctcaaggtgatcttgacttgcccaggtgggatttcacccccacttccttccaggcttcccattttagacttgaaatgtaggcctgttggggcctcctccagtagatgtgtgcccttgagcttggatacccccctgccaagatacgcctttcaaaaacagataaacttatcgcaactgaatagaaggggctcccaaggggtcccaccctgctccggaagtctcagtgaggaatcaatagctgttaattcctgtgctgccccctgcctgacattccatccacacttgaggcccagattgtaagaagggagagcaggcaggtctctcttccaggagagggacccggttcatcagcaggatttattcattcatgtattacgtcaggctcagcgcctgggctttttataaatgagggctctgctggcgttctgtgttattcagatattcggtgagagaccaccagaagccacaaaaaattgctgacatctgttggaaggcaatcatgcataatggataagggtgcactctgcagttccagcagcattgatttgaattccccctctgccgcttcaaaactctgagatctcagcgagttgcttaccctctagagcctccacgtcctcatctataaaactagaaaataagtggtactcactagatccttaccttgttgtgagagtagaatgacgtgcatgtagagctttcccagagctggcatgtggtaggtgctcaataaacgctggttattctctctctctctctcactctgttgcctaggctggagtgcagtggcgtgatcatagctcacaacagcctctgtctgccaggctcaagggatactcctgcctcagcctcctgagtagctgggacttgcaggcaagtgctaccgctcctagctaatttgttttattcttagtacagatggggtcttgctatgtggtccctgctggagtgctggttgctctctaactggctgcgagccccggggtaggcacactggtactggggctatagcaaaatccgtgctcggtaaatcatcattgaaggagcaagggtgctttacagttgtagaatctcatagtacacgttactttggtttttctcttcccagctctggagtcctgggatccaagtgtgagccccatgtctgcaaaatgaggctagtcacttgaatcctcttggatcttgctttcctcatctgttagtgagcttgtagatagctctgactgtcaccaggctttgctctgagcactctgcatctgtattcaacctgtatacttaatcttcacaacagttgaggtggttgatccatagtaatttctcgttgtacaaacggagaaactgaggcagagagataagtgtcttcccaaggttaacagctaaccagtagcagggcacgctgggatttgaaagactctctatgtgtcctaactggtatgctctcctgtctagaggtgatctcttcctccagggttccaggtagattggttgagatgtgcaatgcggaagagcctcgggataagtcggctaatgacaccctcaggctacccagccctcgggagctcacagcagagcagttggggatgccttgcaaggttacctgtgccagagttcctggggtacatattaaataggtaggacccaatactactttgcattttcctggaatcctagactcttaacattggaaaggatttctttgccaagtaattcgccctcatcattaacctctaagaaatgcagaggtggaattagaaggtgcgtgtctctttcttttgcaccacagattctatcgagtctcatctggcagcttcaaggatcatccgcattctttcatcttcatggaatgtcactagattgagatgattctaagggtgaggtcaagcatttggagtttggaactctgccttttgtagagatgctcccgtgggacttgccctgcacccagttcagcttgcttgggatgcatctgctgagcctggaagagaagtatgggttcaaggccagcggtccagcactcccacagacctgatctgtaatagggaagggttgcctctgtgtgggttgggagtttaatcagcaagagtggattagcagcaggctcattctgtttactccagtaggtcacggggccaagggcaaacatacacccctcccagcccagaaactgatagctgcaaagttgcacacccttctccccaaattgacaaatatggttttcattgttggagtaataaattatgctttttaaggataaaaatgttgcccagctgttgagtggtttaaacttccagatgttcctctgctcagtaatcagagcaggatgcatgatgggatctctttaaaagttgatgaacagaatggttcattaaatttcaacaatgtgcctggaatgccaaggggaggtgtagcatctccctcgagggaaggaggtacacatttcctagggtgcttgggtgaagaattagcaagcagtaactgaagaccagttactggtcaggcagggaagcccaagttctggcccctgctgactgtgtgactttgggctgagcagttggcctctctgagtcttaggttttgttttttttttttcttttgtgtttttgagatagagtctcgctttgtcgcccaggctggaatgcagtggcgcgatcttggctcactgcaacctctgcctcccaggttcaagtggttctcatgcttcagcctcccgagtagctggattacagacatgcaccaccatgcctaactaatttttgtatttttagtagagttggggttttaccatgttggccaggctggtcttaaagtcctggcctcaagtgatccgcccgccttggtctcccaaagtgttgggattacagacatgagccactgcgccgagcctgagcctcagtttctgatacttgcaactgggagcatgttttgagagctagagaaagtattgttgtcttgtgtaacatgaaaaaagctgtgcggatactagctaagatcaatgaaaggttatcaaactcaatctgatggtgaaagaagatacagagatcaagcccgtccgcatttttaacgtggggacactgaggcccaggaaacttggggcttcttcaagtagtagctaggcctgtgctgtcccatatggtagccgctagccactagccgcatgtggctattgagcagtcgaaatgtgcgaaaattcaaattaaaatatgttgtatatgtaaattgcacaatggattataagactcagtttaaaaaaaagaaaaaattcataacaacttttgaaatattgattacatgttgagatgataagatttcgatatactaagttaaataaaacattaaaaatgaatttcacctttggtttctgcttagtattttttaatgtagcaactagaaaattaaaaattactgccgggtgcggtggctcacgcctgtaatcccagcactttgggaggctgaggtgggctgatcacgaggtcagaagatcgagaccatcctggctaacacggtgaaacctcatctctactaaaaatacacaaaaaattagctgggcatggtggtgggcgcctgtagtcccagctactggggaggctgaggcaggagaatggcgtgaatccgggaggcggagcttgcagtgagctgagatcgcaccactgaactccagcctgggcgacagagggtctctgtctcaaaaaaaaaaaagaaagaaaattaacaattacatgtgtagtttgcattatatttccactgggcagtgctatgctaaactgtgacacaaacggtggactttagagttgtgcagggtacaatctgcacggccatatgtggcaggcctaccaggtgtggatgaggctgtctgggttcgaatcctggctctaccagtaatcagttgtgtggtattgactaaattgtttaaactctcagagcttcagttgttctatctgtaaaatgagtattgcaatagtgcatgcttcatagagctgttgtaaggattaaatgaattagtgcatataaagtgcctagaatagtgtctggcccgttttaagagctcagtgagtcttggttgttgtagttgttactttagtggttgttttttagaacctgaggacacaaggatggaaagactcagtctgtctgtggcaaaccacgaaaggaaagattaaacaattcaatgcaggctgggtgcagtgggtcacacttgtaatcccagcactttgggaggccaagacgagcggatagttgagatcagaagttcttgaccagcctggccagcatggtgaaatcccatatctactaaaaatacaaaaattagccagacgtagtggcgagtgcctgtagtcccagctactcgggagactgaggcacaagaattgcttgaacctgggaggtggaggttgcagtgagctgagatcacgctactgcactccagcctgggcgacagagcaggactctgtctcagaaaagaaagaaagaaaaaataaattcaatgcagtgattattagaggggtaagtccatcgggacaaatcagggggcattcccactgaggcaggacttgagatgaatctcggaagcagaaatgctgagcttgttgggctggccagagataagaaggacattgtgggcgggagaaacagcacctacagggctgagatggatgaaagctcagttcagtctgggaactgcagaaactcagtttgcctgagcaaactgcaatgtggcaagtgggaaatgaacccaagctaaaagaggacagcagctgggtgtaaattttgtcctgtaacccatggagagccaagaaggattttgagccagggagtgacatgattggatttcatgatcagatcattctaactgctttgaggaggttgtcttggaaggaaagcaagagtctttggcaagaagatcaagagaagaaagattgctatttccaaagctcaagtagtgtatttttcattgttgttgttaaagttcaaaagtctttatattgaaagtggcacgtatgctatgatctcacacctgtaatcccttcccagtttatctgcatgagaaaagcgcttggaatggtgcatatctaaaggtggtttctgctcaatggggatgtggattcttgtgtcaggttgttggggaggctttaggctgtggctgccagcccatcccactgacagccaacttcatatggatgcagagctttttaaccatatcaaagagaaggataggagcttaaaatatgaaactcctgcttttgatatgcttaaattctgggtctgatatctttttgaaagaattaggtttttaattgaaatagcacatgcatatatttaacatcaaatgggtaaggcttttatggaaaatccagattcccctgccctttttctgcctgtccttagccctgtttcccagagtgaatcagggacaggtcagtacctctaaagaataagctcatgttgctccttgtctgttgacttagacttctggaccctcagcaatgtcccgggactcacactgggggaggcagggagaccagcatgccccctcttgccacttgtacttcccattttccccctggcaaggtgtggaacatttatactcccacgcccacacttaagactcctgtgctttatctgcaaggttaattccaacaattgataaatggatgaacagtgtttacattaagaggcttgtcaatggccttcactgcccgtcgaagcagtcggctttgatcacatgtcctttgtgttcagctctctctttgccctcagctttctaatcgccctttaaggggctatctgaggctgggtgaggtggctcacgcctgtaatcccagcagttcaggaggctgaggcgggaggatctcttgagcccaggagttcaacactaacctgggcaacaaagcgagagcctgtctctacaaaacattaaaaaattagccatacatggtggagtgcgcctgtggtcctagctgaggtgagaggattgctcgagcccaggagtttgaggctgcagtgagctgtaattgcaccactgcattccagcctgggtgacagagtgagaccctatctcaaaaaaaaggaactatctggcttcatcctaagagtagttgcattttaaactctcagtcagcttcttttactgtaaaatgggaataataattaacagtctaaattcctaaagtgattatgaaggctgaacaggtgatgcctgttcctcaggcccctcccttggggccccttcagccccatgtgtcccaggctaatctcaaactcctgggctcaagtgatctgcctactttggcctcccgaagtgttgggattacagacacgagccaccactcccagccaggttgctattaaattttacctttttatccaggagcgtgggtcatcatttctttcaaataatgcttctatttatgagatttttctttgtagaaaatgtgggaaatgttaagagtataaggaagaaaataagtcgtgttaacgcaattgctgcatttttctttttttctttgcatatttcttttaaacttgagatcatgtaatgtcaacaagtttattggatttttctcctaatgtagtattagtatttccatgtgttgtaaagagcaagcttttaggtatcatttttaatgcaatataatgttgtaacatcctattgcaatgacagcttgtctttctcccaattttatctgcactattaggtattaagaatatttaatgtggccgggcatgaaggctcctgcctgtaatcccagcactttgggaggccgaggtgggtggaacacttgaggtcaggagttcgagaccagcttgggcaacatggtgaaaccgcatctccactcaaaatacaaaaattagctgggtgtggtgatgcatgcctctaatcccagctactcggaaggctaaggctggaaaatcatttgaacccaggaggtggaggttgcagtgagtcgagatcatgcactgcacttcagcctgggtaacagagccaaacactagctaaaaaaaaaaaaaaaaaaaaaaagaacattgtgtattttcctcttttaaataatgttgagatgagtgttttggtgtatatgtctgtgcatgtgtgcacatatgtgtgcagaaacctataggatagatttctgcaagaattatcaagtcaaaggttctagacatttttaaggctctcaatgcatgttgttcagttgtttccccatttggttacaccaagttacagtcacaaaattacaccaaatattttttcctccatggagttgctttctcatgaaattgggtttctgaggccaggaagacttgggtcttgttgaggtgaaggggataattcttcagcatttgtcactatttttcactatcattttgagtttgatttaaatagcacagtttgctgcgtggaaaatgagagtagctttgaaggggcacagctttgaagggcacacagtagatgatgacatctacttcagaactctggctgctacgtggggtacgaccatgttgcattttcaggatgctttagtggaaatcaaaagcatgggatgcgaatgcaaaaccaaagggcttaggttctgcatctgacatatgtggctagctgtatgttcctagccgcgtcactcaaccttgctcagtacataccttcttcatatggcgtgcatctcttcctcagctatatgggtgtcctcgaaaatgctgagcataagaaaagtgcatttgtatcctctttatttatttattatttatttattttttgagatggggtcttactctgttgcccaagctggagtgcagtcgcacaatcatggttcattgcagcctcaaattcctgggctcaatggattctcttgtcttagcctcctcagttgctgggactacaggagtgtgccaccatgcccagcttttttttttttttttttttttgatagtagagatgaggtcttgttatgttgcccaggccagtttcgaactccttggctcaaacaattccccctcctctgcctcccaaagtgctgggattataggcatgagctaccgctacacccagcctatcctgtttacctacaacttgccagtaaccttgggcaaattgcttggcctcaggatcttggttttgttttctgtaaaatgggaataataataataataatagtccctaattcctaaggggattgggaaggttgaacaaagtgcttccgctagattgcttgacctggtgcctaatcctggtgatttctcgtaaaaatcagttgttctcactagtggagtccaccagacctgatgattccccagcgttgagttcagccaacctgcactttagttcttcaggctggttgtatatggctggctagattcatcgtttggaatcttcagagtcagaagggacccatccaagtttgtcactcaatggatgacaaagtaaggctccagatggtgagtgtctattttggaatttcataactgtttccatttgtgtgtaaaggaggataacacacacagacttacatatacacacaagcatatttgcataggctggatttggaagggtgcacaaagaaaatggtcatagtggctgttgctaagaggccacccgggagctttctggggccaggagagaaacttagccttgactgtatgacttttttacagtcctgttggaaaattttaccatgtgtatcttttagttcttcaattaataagcaatgagttcttaaaattcaccaggtagtaaaagatctttgaaagccaatcctgcttcttaatgcaaggaaagaatccctgggagtatgcaaaatctctgttggttttgtagctgtctatctgaactcacgtgccctggatcctggccacagggctttctttttctttctttctttttctcttttttttttttttttttgagatggagttttgctcttgttgcccaggctggagtgcagtggcaccatcttggctcaccgtaatctccgcctcctgggttcgagcgattctcctgcctcagtctcccaagtagctgggattataggcatgtgccaccatgcccagctaattttgtgtttttagtagggacggggtttctccatgttggtcaggctggtctcgaacccccgacctcaggtgatctgcctgcctcaagcctccaaaagtgctgggattacaggcgtgagccaccacacccgacctagccccagggctttctaacactcacatggactgtctgctgtctcttgctggcctcccagtctgtctccagaatatgttagactgagtcctagacacttagcctctggtcccctggcagccaactgctcctctggttcaccccctggggctccctgtataggggagccatcagcctgactgagcagccctgaggctggagtttttggcttcctcctaaccagcccccttcacggtccaggagcctcccagcacagaagggagaatctgtgcagcttgttccttatcctcctttgaaccaaggcctgttccaagaactccagggcctctctgcttgcacgtcagggttgagctgctcccccaggccccatgcacggagttggcagctccctggaaaaatttccttccccctttctttctggcaaatacgatggattccctgcatggccccagaccatgagtcttgagttgagttctgcaggagcatcttgctgggtggcttcagcaggggcaggggtggaaagcctgaagtcctcctctgtcctgaaagcctttgatcttcattctggcccgaagcccctgtgccgtatttccctcagcaccgttgtaacatctggtgagccaggctgttagggccaagtgcctgctctttggagggcatctagttcaatgtgagcatttttttctacccagcgaccaattctggaaacatcaaagtgtttatgagcctactttttgtttctccattcaaaatgaaaatagctttattgatcccatggtgaggggtgggcagggtgtgtatcttcttgctgctgggatgttctactttgttggacagaaggctatgtgctttctggcaggttacacctgggtacatttcagtcaagccgagctggctctctcctcatttcattctcaaagtagatctcttgctaagggcttcttactgagtgtctagttccttgttgtacaggtgagggaaactgaggcccagagtggatgtgacgtttccgaaggagaggctctgtaaagttctgagtaggtgagacttattattagctgcaaataacaacaacaataattagaagaagaagcatcttctgccctaaatcatggggcttttatttttcagctggatggtgaagcttagtggcctctccttttctcttcttggaagcacaagccctgtgttgtttatatttctctttggccagagatgtattttgaaatttaaatgataaagcaaacaagtcctgttttcactgacgctttagaaaacttgcatgaaacctcttcacggtggttttgggagccaagcgaggccaggtttttctataaacgtggggagagggatgttgaggacagtccatcctcagagagtgaatgattgcattcatcttgattaaactcagtgaatccgtgaaaggatggtgcaggtccgcccccccagactcatccttccatgtgtgtcctcgtggccaatttgtctttgcacgggatggaaagctgacgagatggactatttttttccccttaaaaataattacatgccagatgctcgttccaagttctgtgcctccaccagttaaagatttttggatcttttgctgagaatgcttgttcagaggtaaacttgttagcatctgagacaagcataataataatgattcaggtcaggagctacaaaggactctgtgatgagcaaaaaataatgattgagcctggcgcggtggctcacgtctgtaatcccagcactttgggaagctgaggtcaggagttcgagaccagcctggccaacatagtgaaatgctgtttctactaaaaatacaaaaaattagctggacgtggtggcaggtgcctgtaatcccagctactagggaggtcgaggcaggagaatcacttgaacctgggaggcagaggttgcagtgagccaagatcacgccattgcactccagcctgggcaataagagtgagactccatctcaggggaaaaaaaatgcatattgcataaaataaaaccttatatatattcacacacatgtgtatatatgagatggggtggtcctgtacatgacagctatggttttaaggccccagtgcctttaagtttgttcttgaaatggttggtagccagttcttctctccttggcttcccagaaatcctttccaacccaagagcgtcagaggtactttaagtaagcaagactttcaggtgttgcttctctggcctccctctttcacatctattctataaaaagagggtggctgctcagcccaatgtaaagaaagcgctttctgaagttgaatgagttttacatttcagctctgccagtgtggcagtatgaacttgagaaagagacatcccctctctgacacttaatttcccatctgtaaagtgagatccacaattttacctttgcgggttggcacatggactggagacaatattggtaagatgctgtgttcatttcctagggctcacattacaaattagcaatgggctcctttcaacaacagatatttattctcttgcagttctggaggctagaaatccaaattcagggtgtcaggagggccatgctccacatgaaggctccgaaaaataatctcttcttgcctcctcttggttttggtggttgctggcaatctctggcttgtggctgcagcaatctgcctccatctttacatagccttcttccctctgtgtgtctctgaattctctcttcttgtaataatgccagtcattagatccagggcccaccctgatccagcagaacctcttctttacttaactaattacctgcaaagaccctatttccaaataaggctacattctgaggttctgaatagacatgaattcttgggagcaatcaacccagtacagatgtctggcattttattgcagacaacatctgggcagatgacagcatctggtatttttatgattgtcacttaccagaggtatggatagacatttcttgaagaagataggagcaagcctgattatttgaggaacacgagggccagatagcagaagtggagggagaggtgtggttggcttggcaggtggagaggggcagggatggaagcaaggagcttgctatgtgggggtgtgggagtggggttggggaaaccatattgctttatttcaggagagagtgatgtggcctgtgtcttggtggtagcaaagaaagcggagagaaaaacgtagattttacatttatctgggcaattgtgccaataggacttgcacacggattggatatggaggtgagaaaataagggaatcaagaatgactcctacgagtcaggctgggtggttcatgcctactatagtcctagcacgttgcggggctgtgatggttaatactgagtgtcaacttgattggattgaaggatgcaaagtgttgtttccaggtgtgtctgtgagggtgttgccaaaggagattaacatttgagtcagtgggctggggaaggcagacccacccttaagctggtgggcacaatctaatcagctgccagtgaatataaagcaggcagaaaaacatgaaaatgcaagactggcctagcctcttagcctacatctttctcccatactggatgcttcctgccctcagacatcggactccaagttcttcagttttgaggcttggactggctctccttgcccctcaaacttgcagacagactattgtgggaccttgtgatcgtataagttaatatttaataaactcctctttatatacatacgtgtgtgtgtgtgtgtgtgtgtatatatatatagataaaactcctctttatatacatacgtgtgtgtgtgtatgtatatatctatatctatatctatctctctctctctctctatatatatatatatctcctattagttctgtccctccagggaaccctgactaatacagaggctgaggcaggagggccgtttgaggtcaggagttcaagaccagtctggacaacttagagagaccttgtctctacaaaaaattaaaaaaaaaaaagaatgactcctaggtttttggcatcagcaacctggcagatgctggtgtcttcaatggacacggggaagatgggcagtagattgtgggcgcagagagttctgtgcaggcatgttaaattgcagatgcccattaatggccacaggagatgccaactaggtacttggcaaagtgagtctgggaattgagaccatcatggtaggagatagcatttggaagattttggcagaggtgggatccaaatccatgggagtggagtatagatagaaaagtggacataggactagacatggccactagtggtaggggtagaagttggggagctggaaaaggtgattacaaggagccactggtgaggcagaaaaacatgccgggagcctagagaaggaagaccttcttaaggaaggaggagagtcatcacttgcaatgttgctaagaggtcgggtagaatgagtcacacagaagtgactgttagatttggcatcaaggaggttgttgactaacttggcaagagcgcctcatgggagcaatcaagaggaagccagtgaccaatgaaggtgactgctcttgcgttctgctctctcttcattgccttttgctctttgcttaggcaaatcagtgtcttcagtaggttccttgaaggctaatgtcaccattagtatttacctacccattagctcatttgattctcaaaacaacatctttgcagaaaaggctgggcagggcaggcaggtattattcccattttacagatgagaaagccacaacttaaaaacgtcaagtgtttttttttcaggctgtttcttaaaagtaagagttatgtgtcaggcacccctcctccacccccatctcggcatacatcccagtgttttgtggtttgctacatttcttggttttcttagctagattgtgaacccagtgaagggaggatctgaatgacatctctatattcccacgcagagatagcaaatgcttgccacacttgttactttctcttgggtacccatggcaggcatcactagctgatcatgaccttctcttcctttgagcccagactcagcttagaattctacccagcattccagatagcctgtcaacctgctgacagataaggtatcatcaacaggcatttttactgtagtacttaatgtcatgcctggttcagcaagtggttttgtgactgatttagcaaataagcattctctgaaaacacagtgagtgagttctatgtcactagaggtaatcaagaagagatcaaattcatgcacatggccgggtgtggtggctcacgcctgtaatcccagcactttgggaggccaaggcgggcggatcacgaggtcaggagatagagaccatcctggctaacatggtgaaaccccatctctactaaaaatacaaaaaattagccgggcgtggtggcgggtgcctgtagtcccagctacttgggaggctgaggcaggagaatggtgtgaacccgggaggcggagcttgcagtgagctgagatcgcaccactccactccagcctgggcgacagagtgagactctgtttcaaaagaaaaaaaaaaaattcttgcacaattggataaggtaaatagaattcaggtattgggtaaaaggttatccaactctgagattatctgatattcatggagttatttaatgaacagtagtatctcttaccattctggaacaaaacaagaaacctttgagaggaatctccccccacctccccagatatataggaggggacagtgggcaacactattatggctcctttcttgttgtcttggccacttggggctctggtctcagcctttctggattgccataatctgttgggccctatggagccaaagggagtaaacagaatagtactgttctgggttgttgagggattcggtgagattccctaggtaggttttggtcaacaagcaggcatttcataatcctctctacctcctgccctgccctggggattgtgaggattgtctgcattcctctgtggaactggaatgtggctgcagtgatggtgtctgcagagatgttgaagctgctcctctctcctgccctctatcttggcctcgcccggtcctagccggggtaagtgaacatcaatcccatggacagagtcttctctgaaaactgctttatggatttttttttttttcccagacagggtcttgctctgtcgcccaggctggagtgcagtggcacaatctcactgcaacctcagcttcctgggcttaagtaatcctcccacctcagccacccgagtagttgggactacaggtgcatgctatgatgcccagctaatttttgtatctttagtagagacaaggtttcaccatgttgcccaggctggtcttgaactcctggactcaagcgatctacctgcctcagcctcccaaagtgctgggattacaagcctgccttatggatcttaatgtcttggcccgagggcattggctctgcctggctccagagggatatgaagccattcctgggggacaccattgttttctagttaatattatcagtcctgtagtccagtgattttcaaattttagtgtagtcagaatcaccagaagggcttgttgaaacccagacagctggacccctccctagagacttaggatgaggcctgagaattggatctaacaagctcacaggtgacactgaagttgacgaccttgtatctcactttaagcaaagtcttcccataggaaccattgttcctccctgcccataggtaatatcttctacttgggccctctgcttccactgtggcctgcttacaacctcacctacacttattaactagcagagttcactgagtctgcttaaaaccttaaacttcaaactataccacaaggctacagtagccaaaacagcatgatactagtaccaaaacagagatatagaccaatggaacagaatggaggcctcagaaataataccacacatctacaaccatctgaactttgacaaacctgacaaaaacaagcaatggggaaagaattccctatttaataatggtgtcaggaaaaccggctagccatatgtagaaaactgaaactggaccccttccttataccttatacaaaaattaactcaagatggattaaaggcttaaacataagacctaaaaccataaaaaccctagatgaaaacctaggcaacaccattcaggacataggcatgggcaaagacttcatgactaaaacaccaaaagcaatggcaacaaaagccagaattgacaaatgggatctaattaaactaaagggcttctgcacagcaaaagaaactactatcagagtcaacaaggaacctacagaatgggagaaaatttttgcaatctatccatctgaccaatggctaatattcagaatctacaaagaacttaaatttacaggggaaaaaacaaacaaacaaacaaacaaaaaccccatcaaaaagtgggcaaaggatgtgaacagacacttctcaaaagaagacatttatatggccaacaaacaaatgaaaaacagaaaacaaaaaacaactcatcattactggtcattagagaaatgcaatcaaaaccacaatgagataccatctcatgccagttagaatggtgatcattaaaaagtcagggaacaacagatgctggagaggatgtggagaaatagggacgcttttacactgttggtgggaatgtaaattagttcaaccattgtggaagacagtggggtgattcctcaaggatctagaaccagaaataccatttgacccagcaatccaattactgggtatatacccaaaagattataaatcattctactataaagacacatgcacatatatgtttatagcagcactttttacaatagcaaagacctggaaccaacccaaatgcccatcactgatagactggataaagaaaatgtggcacatatacaccatggaatactatgcagccataaaaaagaatgcattcatgtcctttgcagggacttggatgaagctggaaaccatcattctcagcaaattaacacaggaacgaaaaaccaaacacagcatgttctcattcagaagtgggagttgaacaatgagaacatatggacacagggaggggaacatcacacactggggcctgttgggggatggggggcaaggggagggatggcattaggagaaatacccagtgcatgcggggcttaaaacctagaagatgggttgatgggtgcagcaaaccaccatggcacacgcatatctatgtaacaaacctgcgtgttctgtacatgtatcccagaacttaaagtacaaacaaacaaacaaaaaacctccacaaaaaccctatctccaggcttcccattgtatctcctgacttttttgaaatcctgagcagcctgttcctgttgatcgagtgaatgagcattctctgaaattgcagtgagtgagttctccatcactagaggtagtcaagaagaggttggaatcacacacaattggatgaggtaaatagaattcatttgttagatagactatgcaggcctaagattgtttagtattcacggagttattttgtgaacactagtgtcttccagcctcatcaagtggtccctccctctgtagccccacatcctggtctttgatcagttccctgacacccttccctgggcaccacaggacctttgcacttgctggtcccagatcctagaatgctttttccccagcttgttgaaaagctgattctcatcctaacttcaatatcacctcctcagaccaccccttctaatagactcattccctaacctccatttctcatcactggatgctgctgaatttcactgtggcaccagtcatagtctgtaaaaaaaatttattaaattatttggctctttgattttggtgtgactcctcccctagagaaaagaaactgactttgtccttgaactctgtgttgtctgacactcagtgggtggttcatacatattctttttttaaaattaattttaatttttattttacattccgaggtacatgtgcaggatgtgcagatttgttgcataggtaaacgtgtgccatggtggtttgctgcacctatcaacccatcacctagttattaagcccagcatgcattagctattttttctatgaaaggtgagcaaatgcttgtatacaggctgcagagggttaggtcaaggctgaaccatgtagtctaaattttggagtgactgcagtgaagcccctccatggtggaagaaaatggaatgtccttgttggagctggccagaactgggcagatccagaggctggaggtaatggcaataactctgactgctaataataaaataagaacgtaaaagagtgcttacagtgtgttacaggcactgctttaagtgcattacgtcatttagtttccacagttgtctccatgttacagaggagaggactgaggcacagagtattacaataagaaacttggcccacagtcagcgagcaagaaagcctagattcatacctgggcatatggcttcagagtccacacgcttggcgcctgcactgcaccgagaggggctgctgggccgggagtcccccacctgctctctgttttcaaactccccatttcacacccatgccaggtgtgatgaaatcctctaggtgatgggcagtggacatgagtggttctggttacagttggacttcactggcctgtcccacacctgaggatatggattctagcccatgggaccataagccaggccccctgagggtctgttatttgtctgggaagtggcagcgctctttggaatcttgttcatgactgacaaacacccccacgccccttcagccataattatcacctagtccccagagaagggccatgggtgggctgactgtagagatagacgcttgggtctctggctgggaacaccacatgcaagagaagaggccatgggctcgccttccatccagctgaagtctttctggccgggctgcaggcttcatgcaacacctttcaacctgtaaaaggaaaaaagaaggccgggggtgggcctcagctgctgccactggcattgtatcactgaagcgttttttgttgttgtttttttttttttgaataccggaaattaaggggaaattcggaaacctcataatggcttcatgaaccattgcacttggaaaatgtacttttgaaaaattcccttgatttattgtttttcggaggctgtagataacattagagtatattattcctatataatttcctgagttttctatgtcaattactttgttttattaaagagaaaaaaggaactaatattgattgaggccctcctgtgtgccaggctaaatggtcatccctttcagttgttagttacaaagtgaccctatgaagcagagaagatgagtattgtttagcgatggggaaacggagccaggggaggaacttgccccagctcatggctaggatttggaattctgtcccagtgttcatactcttttgtgttgtcaggtatgatcagcctatgtactgcttccttgacttagatttttgtggggtagagaatatcagttgtagctctaaaggggtgtgattatttatgattttttttttttttttgaggcggagtttcactcttgttgcccaggccggagtgcagtggtgcaatctcggctcactgcaacctccacctcctgggttcaagtgattctcctgcctcagcctcctgaatagctgggattacaggcatgcgccaccatgcccggctaattttgtatttttagtagggatggggtttctctgtgttagtcaggctggtctcgaactcccaacctcaggtgatccacccacctcggcctcccaaagtgctggaattacaggcatgaaccactgcacctggtctcatttatgaattttaaaaatatatgtgtatatgtaatatctgattatatatcacatcacaatttgctgcagagtgaggttgtccttcctaaagtacttgtcttgcaaggctatggacagatactggtaatggaacctgtgctcagaattgttgggaatctgtagtttaaaggtttgtcatttggaggaatatcaagtaaaccctatggggtcaaaaacaaggtctagccaggtgcggtggttcatgcctgtaattccagcattttgggaggctgaggcgagtggattacctgaggtcaggagttcaagaccagcctggccaacatggtgaaaccccgtttctactaaaaatacaaaacttagctgggtgtgctggcaggcacctgtaatcccagctactcaggaagctgaaacaggagaatcacttgaactcgggaggtggaagtttcagtgagtcgagatggtgccactggactccaacctggtcaacagagtgagcctgactctgatgatagtaataaataataatggtagcttctatttattgtttactactatgtgccagacactattctaggtgcttttcatcaattagctcatttcatcttcgttataaccctatgttctaagtacagtcatgtaccacataatgatgtgtggatcagcaatggaccgtatatacaacggtggccctatgagattataatacagtatttttactgtacttcttctatgtttagatatgattagatacacaaatgctcaccattgtattaagttgactccgatgttcagtacagtaacatgccattcaggactgcagcctagaagcagtaggctgtaccatatagtccagatgtgtagtgagtaggctgtcatctagttttgtacaaactccctctgtaatgttcgcacaacgaaattgcctaacgccgcatttctcagaatgtatctctacccttaagcaacgtgtgactgtcctattatcatcaccccattttacagatgaaggagctgtggcaagaaattgactaacttggcccaaggtcacccatataataaaaggcgggctgggtgcagtggctcgtgcctgtaattccagcactttgggagtccaaggggaataggatcacttcaggagaggagtttgagaccagcctgggcaacagagggagaccctacctctaccaaaattataaaaaaattagccgggcatggtggcatagacttgtggtcccagctgcccagaaggctgaagtggaaggatggcttgagcctgggaggtcaagcctgcagtgagccgtgattgtgccactgcactccagcctgggtgagagagtgagatcctatctcaaaaataaaaaataaaaaaaaaatgaaaaaaaaaataaaaaaaaataaataaaataattaaaaaaagagctgggacttgaagccagataataaggcaggcagagggcatacgaaacacccagatgggtcatgagcccgtgcatcagtcagggtctaatggctcagctgaggaagggaggtttaaggaagagactgtggacagaggtgttagggaaggtgtcagagaaggttaaggagccaacatggatcatgggggtggtacagtgttgccagggctggggaggattggctgcagtgtggggtacccagccgctgccatgtggagagggacctgtcactcctgctgtgaactctcccttcttctgccctctgacctcctgctggtgcctcccattggctaaacacagttgatggccagtgcactggggagctgttcttggagcccacaggcatctgcttcttggcacagagcagacaatggattgagtcgggagggaggggaactagagaatacccaagtcccaatggctggagaggagtgagcaggtaaagggggtagaaggtgaagtcagagaggccggggtccacactacacagggcctttggctttcttcggaaggagcaggaagccagtggagggtttgagcagatgtgtgcatcacggccactgccatcaggagaacgtctttctctatgctaggtgtgaacagtcaccccttcctctccctttctcaggatgagtgctgaggaggaaaaggccctttcctccaatgtcttcagaggagacgtctgcccagtccagactacgtgcctcatgccagccagcctgtaaatgacaggaaagagaaaggagcagtgtctcaaaagaggatattctggaacgtttgataatcagagcccattgtaaagtcatgttttgagttacagcatttaaatctttgttccagtggaaaacttttacaggccgtcctgggcaaggcttgaatcctgtttggatctccaaaggccttaaaatagtgtgggatgccgggagactggctccaaaagggaggagacctgtgctggcagccctggccacaccttggtgggaccggctcctggccttggggaccctgccactctcctagctgtgcttccgcagagctggacacacaaaagctttcttgtctggatttgttcccctaagagggtggcaccgaactggtcctgcccatgcaggaagctggtcctgtccaaccagggaatgaaaagttggccagtatcttctcaggccacgctacagccaagtctcttttaatgagctggttctcttaggatgcccaggggagggagaacacacttgagtgggatggcgaatgaagaaggaagcggctgttcagacagcttccagttctgtcaggttctgctgctgtgaccaaggcaccaagtcatctggaaacccactgcaggcagcaacctctttttcacctttgtgtgccccaaagcttgctccgggaatcgatggtttgggaaacaatgcttgctgtctttgagtcctcagtcctgtaaaatggggaaagtatacatcagagggcatttgagagtaaggcaagaagcgcttggcatgtgcctggcacatagtacctgttcagcagattccctttcagctcagggttagatcttcatccacctcttgttggcctgaaggaaggggaggtaggtactattagccccatttattttattttatttttttatttttcttgagacagtcttgctctatcacccaggctggagtgcagtagtgccatcttggctcactgcaaccttcacctcccaggttcaagtgatcttcccgcctcagcctctcaagtagctgggattacaggcatgcaccaccacgcttggctaatttttgtatttttagtagagagggggttttgccatgttggccagtctggtcttgaactcctgacctcaagtgatctgcccacttcagcgagattataggcgtgagccaccacatgtggcttattagctccattttataggaggtgaaattagacagcaagaggctaaatgccatggctgaggtaagatctgtggtagcatccaagtcttgaccccagacttggtgtacttctcatcacagatgcaattttgtgcctcatcatctgacccaggagctacacatctgcttttttttttcttctttctgagacagtctcactctgtcacccaggctggagtgcagtggcacaatcttggctcactgcaacctctgcctcccaggttcaagtgattctcatgcctcagcctcccaagtagctgggaccacaggtgtgcgccactacccccagctaatttctgtctttttagtagagacggggtttcaccgtgttggccaggctggtcttgaactcctgaccttgtgatccaccctcctcggcctcccaaagtgcttggattacaggcgtgagccactgcgcctggctaaagttgttattttaaaattattatttatttatatttgttattatattttttatttatatatattttgttatcttatttttaaaagttgtatggcccatttaaacttttgcagaaatagttttttgaatccatggatttaatgctttcctctttaaattttttttaagtcaatttagagtttttaagacaaaaactggaaaacggctttgctcttttgtggaactgctctggattttttttttttttttaagaaagaattttgctccatcacccaggctggagtgcagaagtacaatcatatctcactgcaggtttcaactcctgggatccagtgatcctcttgcctcagcttcctgaatagctgggaatacaggtgtgcgctaccgcaccaggctattttttttttaatttaaattttttttgtagagatagggtctctctttgttgctcaggctggtcttgaactcctggcttcaagcaatcctaccacctcagcctcccagcgagttgagattaaaggtgtgagccactgtgcatggcctgtgttgaattttttgtctccccattcccaagtagcaactctggactccacagaaaggccgagtctctccaagacccagccgtcttggagggtcatctgtccactcctccaaagagggtgagacagggccaataatgaagtgatcactgtgcaccaaccctccctcttgcttcagaagagaccttttcatccctgagccaattaatcaatttcaagagatagcatctgagtgagatgggtcaccaagtcacagaggccctcagctcctgtgccggctctcaaagggggttgaatgaggtggccttaacagattgcctagtacccaacttcctagagttcgtatagtagagagcaagtagcatagggctagaaggccaggtcacaataccctctctggagtcttctgaatgtatgaccaataggcaagagccccagtttcctggtctacagaagtgacagatgggaccctacctaccacacaggttctgaggataaaaatagtgatatgggctgggcacggtggctcgtgcctgtaatctcagcactttgggaggctgaggcgggtggatcacttgaggtcaggagttcgagaccaacctgggcaacatggcaaaaccccatttctactaaaaatacaaaaattagctgagtgtgatggtgcatgcctgtaatcccagctactcaggagggaactgcttgaacccgggaggtggaggttgcggtgagctgggatcatgccactgcactccagcttgcgcaacagagcgagactctgtctcaaaaaacaaacaaacaacaaaacaggtaatatggttggaagaggtttatccttgccaagtttttgtaaatcaaacagctcttgagagatgcctgtttggctgtttttatttttttagagatggagtcttgctcagttgcccaggctggagtgcagtggcgcggtctcggctcactgtaagctccgcttcccgggttcacgccattctcctgcctcagcctcttgagtagctgggactacaggcgcccgccaccacgaccggctaatttttttttgtatttttagtggagacgcggtttcaccatgttagccaggagggtctcgatctcctgaccttgtgatccaccctctccggcctcccaaagtgctgggattacaggcgtgagccaccacgcctggcctgtttggctgtttttttaataggaggtgggaatcccttgtcttcctgggcagactagatgtgatgtgttcacagggagctttgtacagattgcttgagagaagcacctttctttccagagtggctgcttggacgatgccttccaaagctgctaagtcctgtggcaggggattgttgatattcttcatggtttctctggggagcctcctagcctctgaattattgatgcatgtctacattattattattttttttttgagacggagtcttgctctgtcacccaggctgtagtgcagtggcgcaatctcggctcactgcaagctctgcctcccgggttcatgccgttctcctgcctcagcctcctgagtagctgggactacaggcgcccaccaccatgcccggctaattttttttgtatttttagtagagttggggtttcaccgtgttagccaggatggtcttgatctcctggcatgtctacattattaaaagggtctctttgcatgagttagcagaatgtagtgccctctcgtgaatgagaaaagccgcccagtcctgattgcagcctcataatgggtctgaaatgacaagtgtgaagcagtgggcagagccaagaccacctttatttgtgcatccgtgctcttgggtgggtatgtttcacacagtttgttgtccttctgtcccttgcccatgaggccttagaaactcagcttgtctccacccattcctctacaacccacacaacaacttgtaaccttttaatcttctttgcttcctaaagatgcaactcatgccacctcccccaggaagttctccctgacttccaatctttagaataggctgccagagatccctgtgttaactgtgaacagagcccttttcatcctcttgcatcagaattcctgtctcatccactcgactgaacttcttgggtaggaatggaggtgtgttttttttttgttttgtttttgtttttttgtttgtttttaagatggagtctcactctgttgcccaggctggagtgcagtggcacgatctcggctcactgcaagctccgcctcctgggttcatgccattctcctgcctcagcctcccgagtagctggaactacaggcgcccaccaccacgcctggttaattttctgtatttttagtagagacggggtttcactgtgttagccaggatggtctcgatctcctgacctcgtgatccacctgcctcggcctcccaaagtgctgggattacaggcgtgagctaccacgcccggccggaggtgtgttttacatgcatctcactgcctgggacagcgcctggaacctagcaggtgttttatgtgtggggggtgttggttgtagtagtggggaaaggtttcttaaatgaggtgtgtttagaatttagccctttgcagggtataaaatctgagaaataaggtgtgtgttgtgacgagggatggcactgggggcctgcctaaagcactggcttcattgtgggggctgaggtggcttgtttccttggagctaatggtcagagtgaggagctggggactgagcttggatctagattattgttgcatgaatggcctaaatgaagagtgttttctcaagtccctatagaagagggagatcctcatggctttcaaggagtcatgcccaagatacaggaatggctctctggtggactggctgggacagaggggagagggtgaaagtggggaggaggaggaagtttaacagtatttgaagcatttgaaagcctagacccatcgtacgctgaaacagagaagaatggctagccaaaaatactgtgtgagtctaggaacttaagaatgctagtccttgaccccaaacatacttatatagcagactcaacattattgtcttccacctaccggatgggattatgcaagtgatatgacccagagcattctggaagccggcaggggcataaataatacattagatatgcagatgaactgcccagggtgtctctggtcttgggaagaattcttagtagacctgagataattgcagaacagagtgtcctgttttcccatccacagcctccaggcctggcgaggattttgtgttcaaaagagatttccaaggtggacatctctctgacactggcgatttttctctctcacttgaacaaaactcggcggaaaggtcactcctatttgtcttagcttctctgtcacatcccacccacactttgaaaggtctgttcttagcggggtcccaggaaggctgtgctggccctgtcagccctgagctgggtggtagtcctttatcagagatacccatgagaatcactcaccctggagcctttcccaagcacacatcgtggacccctccagggctgcacatgtgctttgtaagggctcttcaggtgactggagctttaagagctactgaactaagtggtaataaaagtgaacaaagtaaccagtctggaaatgtcagtagaatggaaagaaagaacaggtgggagagttctccattttttcacggtaagacccggttacttggcttttgttgagtccctggtgggtgtccatggtgtctttggccttatctccctactaaacaggattacctgtgtggggcacctttcctggtctcctctctctccaaggagcaggtagtacttggaggccgtggttaatcacatttcctaagtgagcttttcctttctagaatgatccttgctcttacccttgcattcctactgcatgttccctcaggctgaagccttcctttacatgtgagcattctcctggatcaactccctgatgactggagcctgtgccgtgtgtttccaagttgcacccaccacccacggagactagctcatggccgagtggcagctggtgtagctgatagctgtgtgggaaatgggtctgcacaatataaagacagctcacaggaaaggggccccaaatggtactctctttttttttgagatgttgcccaggctggagtgcagtggcgcaatctcggctcactgcaacctctgccttccggattcaagcgattctcctgcctcaccctcccaagtagctgggattacaggtgcctgccaccacacccagcaaattttttttttttttgtatttttggtagagatggggtttcgccatttgggacaggctggtcttgaactcctgtcctcaggtgatccgcccacctcggcctcccaaagtgctgggattacaagcgtgagccattgcacatggccttttttttttttttttttttttgttgttgttgttgttgttgagatggagtattgctttgttgcccaggctggagtgcagtggtgagatctcagctcactgcaacctccgcttcccaggttcaagcaattctcctgcctcagcctctggagtggctaggattataggcgcccaccaccacacctggctaatttttgtacttttagtagagacagggtttcaccatgttggccaggatagtcgaactcttggccccaaatgacactttgataagttgctctacccaatcctaaaaaaggaaatacagataaaaaataccaacgttgtataatacacatgttgttgatgcgctctgttgttggcaaaagctgtgttgctggacggaatgcaagtggatgtggccctttgggaagaattatggccttttggcattctctatccaaactacaaaagcatgtgccctttgacctggccatctcatgttgggacattgggatatttcccctacagagataacctatagatatttgtaggaaaagaacagtgcccaaggttattcatggaacatttttataaaagcaaaagactgggagtaactcaaacatctgtgagttgaagactggcaaatgatgacacattgtgctaggcaagatgcggaaaggaataaggaagtgctgtgtgcacaaacacggggagatctcaggatgtattgttgacacaaaaagcacaatgtggagcggggagtatggcatgccatcttttctgtaaaaaaaaagcatgggtgtagaggggatgtaaaaatgtgtctttgcacaaactctgttaggatgcacaggaaaccaacacaagtggtggcctgtgcgtggtgggaggagggagatgcagggaggggagactgggttagggaggaagatgcatgaagaagattttttttttcttttcagagataaggtttcactctgtggcccaggctggagtgcagtggtgtgatcatagcttgctgcaacctcagactatgaaggagactcttgattgcgtatctttgggtatcatttgaattttgaagcatgaatatattgaaatcgggagcagctcaaacattgagtatattatctatcatacatttaatttaaaaagtttataaccttgtcatgattaggctggggttatgcatttttaggagggagaccccagaggtaaaacgtcagttcttatcacatgtcaaggttatgttctattcacgcgactgatataaatcccggttgcatatccctataatacacctgaccaaagccaggtgtggtggcatgtgcctgtagtctcagctactggggaggctgaggcagggggttgcttgagcccaggaattcgaggccagcctgggcaacatagcaagacctcatctctccaaaaccacaaatttggctgggcgcagtggctcacgcctgtaatcccagcactttgggaggctgaggtgggcggatcacctgaggtcgggagttcaagaccagcctgaccaacatggagaaaccccatccctactaaaaatacaaaattagccgggcgtggtggcacatgcctgtaatcccagctacttgggaggctgaggcaggagaatcgcttgaacccgggaggcagaggttgcagtgagctgagatcgcgccattgcactccagcctgggcaacaagaccgaaactccgtctcagataaaaaacaaacaaacaaacaaaaaaggccaacaaatttgaccaatactcctcaaaactggaaaagctggtgaccaccacccctagtgctccaataaagggctgtgggaacagttgtgctcagggtggtactggtacagcctggcagaggacatgatgcttgcatagtgtggaaaggccctctgagatattgctgggccttaggggaggaggtccaggcctagagaggactgaagccctccccagggcatggtgtggaccacgctgaagggaggtggggttggagacacagctgggagtcagatcccaggggctctcctgtgtgatgctgaattgctgggaaggggatgccagctagtctctttctctgtgccaaccctgattggttgggtggctgctgagagccttatggtgccctggctcagtaggaagagtgtgtgttcatttagtgagtttgccaaagacaagggaagggggttagagagtaggtggcagataatgccggcctggggatcctggaggttttaggctggcagaccctggctgaggctgttttctgttcttttccttaggccttgggagacctttaccttttcagtgcctctaagacagggtcagagcagtttggtgacaaagtggaagtaaaccatgggtgaaaaacagctctggggaccctcataggcttccacttattgaggattaggcagaacttgcagcttggcccagctttcgaaacaaggtgttcccaggaggtggaaagactggttttcaatcagataaaggtaggatcctatgaaaaactcctagggccttgccgttcctatgaagtggtagctatcattcacactcctagttatgccatcgaggtaaaaagaggtggaataagaatcagggacacttgaaaataagaaaagagaaagactgcgtgcatgtgcatgggtgcacagcctgtacatatgtgtgtgtgtgcccctgcgtgcacgtgcatgggtgcacagcctgtacatatgtgtgtgtgtgcccctgcgtgcacgtgcgtgggtgcacagcctgtacatatgtgtgtgtgtgcccctgcgtgcacgtgcgtgggtgcacagcctgtacatatgtgtgtgtgtgcccctgcgtgcacgtgcgtgggtgcacagcctgtacatatgtgtgtgtgtgctcctgcgtgcacgtgcgtgggtgcacagcctgtacatatgtgtgtgtgtgctcctgcgtgcacgtgcgtgggtgcacagcctgtacatatgtgtgtgtgtgctcctgcgtgcacgtgcgtgggtgcacagcctgtacatatgtgtatttgtgctcctgtgtgcacgtgcatgggtgcacagcctgtacatatgtgtatgtgtgctcctgcttgcatatgcatgggtacacagcctgtaactacatgtgtgtgagcctgtgggtatgtgaggggagtgagggaccctgagggactagaaacttccttaaaggccatttgagagagtgctgctttctataccacccaccctagggcagttaggcaaaggtgtgcctccctttaagaggacctagcggtcggtctggtttacaacataggttatcagggagtagtactttggcctggaaaaggaacctttattttggaaaagatttgtaatctctgtggcttgtttgatacacattggaaacctgactggaaactcaggccaccagcatctgttgggggcacatgtttgcacttttggttatgatgccacggccctggttcaggtatcctaaagaagataattaatgatgaaaatgattggtgtagatttcataccacagagcactgtggtttgtatagtaagacacagtgatggtgtggacccatgcacagccagctttgcagatgttaagaatagcgactttgcctgacataattggtgtctgcacatgggattaaacaagtaagattgatgtgaattttattctttcattttttatgtagactcactgattgggtaactgtggaaataatgtcacagtgcctttttaagttaagaacatgtagttgtgatcaggagcggtggctcacgcctgtaatcccagcagtttgggaggctgaagtgggtggatcacctgaggtcaggagttcaagaccagcctggccaacatggcaaaaccccgcctctactaaaaatacaaaaagtaggtgggcgcctgtaattccagctactggggaggctgaggcaggagaatcacttgaacccaggagctggagattgcaatgagccaagatcgtgccatagcactccactttgggtgatagagggagactctgtctcaaaaaaaaaaattaaaaaaaaataaaaaaagataaaatgtagttatgaaaagatttctaagcatttttaagcattttatattaaaacaggaattcagaacaaatcaaaacgaaacaataaaactggggatgaaggaaactcaattttaaatataaactttggcaggtgggtggtgaatccgggtgttgtgagtcatttgctggcttgtttgtcacatggcctgctctataagtgtcaccctaattgatgtattcgtttggagtgggtgctcttctgaggtttttgtttccccctttctttggggtgcactgtgtgtgcatggtaagaacaagggccatggaattagagaatcttgagtttctaatgcaaattcagttccaagcagtgtgacctggttgtttaactcctttgagccacccccgcccatggccctcatctgtaccctgaggataatagtgtgggctttgcaggcttttggtgagcaagtgagatgatgtagcaaaacacccagcccagagcctagcaccaattggtctgtaatccatgctgcacggacacagccattctctggatgtggcctcttctgcctccactgtgaggtcagagactgagtcactgcaggagtaacctctccttggcaagcagcgggagtcatttcatcccagcctttcaggagggtgaatctgcacctggggtccagagtctcagagatgagacgtgagccaggcgctgattcatcatgatgcaggctgtggagactctagccatggtttctccatgcaggagtgaggttgggataaggggtctttctgggggctctgtgctctgtggcccctgctgctccggactggttcattggagaaacctgtcacattctctagaccggttgccacgccatgctcacagtctctgttcttgccttcctaggtgggaagtgagtgatgaccctgaagtgaggactcatctctagatctccaagggctgcagctcagccagcactttacaagggtgatctggagccaaactggcctgttggctgaccataggtgactctgggtagcccatacccaggctcagcagcagttggggagctgcctcgatttctggttacagaattcctggaactgagtcactgcagtaattgctgtgatgaattgtgtttactttgtgtgggattccaaactgtagcagcagtgactacagctggaagacagcatgatcagcagcttccaaggcagagcctggcgtcagaaagctgcattgcgctaatgctgaagcctgtgggagcctgttggagagacacttggatgtttagcgagctggtgactctccttgtcatgagtaagcttaggaccttgggcaagtcatccaaactcttctgggcaagtcattctcctgcttggatgccttgaggcagagaggcagtgaggtgaagtggtcagtgcgtcgactctgcctctagcctgctggggtttgaatccacctgtgtgatgttgtatgatattgacctttctggctctcagcatcctcttgtgtgaaataggagattttaacagtatctatttcgtagggttggtgtttgaatgagttaacatatgtaaagtgaatggtacagtgcctggcttcctggcaagattgctatcaggattaaggcaggttaagcccttggcacacactaagagctcaataaatgtgagctgatgttattggtcctttattactattcaagaagcctgcccagccctcctccctctccatccacacagcagcctggtacccgctgttctctaggttctggacacacgttatgacatgttctgatgatctggcttagacagtggggccctcgaggtaggcccagaggacttggtcctcactgcctctgtggcgccttgcactgggtccagctgacgtggagagagactcaggaaacagtggctgagtgtgactttggctggcatagtggttgctgagagaacagacaaggttctctctcacgacatacagatttcagatcagggaaagtcccagctggcataagtttatcgagcatctcccatggacaagatcagctgtgggtggagccttgaagtacatggtagaaggacagcgagtcttcccaggccagggcttcaagtgaggagacaagatatagcctcccagagaattcctataatgcaatcgtgaaagaaccatacccagcaggaggccggggaaagtgactcctgcaactctaggaaggcttcctggaagaggtggaacgtgagcagcataggattttgagagaagaaatggaatgggctgagggagattctgctggtggaggttcaggttgacctaagggctggcagcagtggaggccccccacgagtgagtttgaggggcctctttagctcagtccagttgaggcagcagagcctttccataggggtgtggtgtgacctgaatgttgggcacgtggtcgtaactgagctttaaaagtgaatgagaggagccatgcgtgatggctcgagcctgtaatcccagcactttgggagatcaaagctgggggatcacctgaggtcaggagttcgagaccaacctgggcaacatggtgaaaccctgtctgtactaaaaatacaaaaatcagttgggtgtggtggtgggtgcctgtaatcccagctactcaggaggctgaggcaggagaatcgctccaacctgggaggcagagactgtaatgagccaagattgtgctgctctactctagcctgtctcaaaacaaaaaacaagaaacaaaaacaaaacaaaacaaaaaaacactgtctcaaaaaaaaaaagtgaataaagagagaagaaaggcggggcacgatgctttttaagtctacgagcatcttatagcattgtttacatcccagcttttcactgacccttcctttacccccgcccccatcccgtggcccttgctctgtcctgccctttctgtacggcgttttctcttcccggctcctctgcccccagccccacgtgccaacttgtttcagcctggcaaggaggcctgctggtatcccagccatttcctgccccaaggccgcccaccctcctccgatctagcatggccttgccctccgtaggcaggcctcacccctgcggcagccgggaagcagggctcctgttttgcctgtttaccctggcgcagggacaggtagatcatgtagcactgctgggatgccagctgcgtaagtctccggcagtgggcacaggcggagggcagggggcattcctctgggctgactcgagcccggcctgcctggcacaagaccccctgctcctggaggcagctcaggggcttgctcatggctgccctggctctgcgctgggccgctgagtcatcgctcagcagtgaggcctctgagtcacagtgcagccctggactggacagtgagtgccttgtgggaccctcctgggctttcctgtccctcagagcatttaaaggggtcccaaattgtcatgtgaccctctctgatgccagagagacactctaggtctttcgcgccctggtcattttacagaactgtggctggatgccaggcattcagagatacattcctcaatctcggtccgccttacaggatccagcatcgaagagttcagttcaagtcagcagccgagttacaggaaagcagccagggcaatgattcagcaagtccaggcaggagtgaaccaggcaagatttcgggaggagagggctgggtcgcgtgtcctggcagggccacaggaagagcatacacatctcctgcgtcttcgtattttgtgagtgtcttgaaatgaccttgagaatctacgcaataccatgaagaagcaggagcaggaataccatttatccattggcacagggtagcatgctcagtgtgcactgaggttgtgaattcttgtcctgacccaaagatgctgatgctgtccttatacccatttcacggttgaagaaactgaaggtgtagtaggagaagatactgactcagaggcacagagttagaaagcagcatgtctgggatttgaccccagacctgtctgactcagtttactattttaaactacccgattcaagttaagtttctctcctctctctctgtctctctttctcccacgtggctgctggaatcttccctaaggaccatagctgtctgcagtgcaggaagccaactattaaggggaaacaaaagtgttcttaggagtcctgctgtcactgtggattgagccggtgaagccctgagggatttcatcgctgaggtggatggagaagcagctgggggccttggctgtaaggacccctaagggttagtgtctggagcttgggggatgggaatgggtcccggtgtgcggaaattggatggctcgctgaccccaaggggaaacccttgttgacgctgtaaagtgtcttctggccttagagaaaccctctagggttcaggttccagcttcaccctcctttagtcaggtggctttgggggggacatttctgctggccctggcagacactggactagagcagtgtttctaaagtgtagccccttctctctcccgggaagggagacaagtgggtgaggggattggaatctgcattcataacacactccccaggagagactggagagcacctttcccggtgaactcccgtcatgtcaggcctcagcagactgagcgggaacccccaccagcgaggttgctcaggacagcgtttctcttgggcctgtgtttggaacaagtatcctttgaactaatcactaacctgtgaaaatggatagacctcgtgtgaaaatgaaaatgtctggcttcccttctgaggagcggaggcatgaaaggtgtggccggtaggggtgggggccccacacctgtgcagccgccctggccagagcccacaagcagcgtcccctggtcatgccccactcccttctccataatctcgcccctccctgaccaggccacctgacgttgccatttatattcaagttcattccgttgttattcttttagaaaagagagatgagaaatatttcttgtgcctacatctttatcaaaagtagagcaagaaacttgaggactctgtttctagaaaaatgagagtgggcatccctcttctctgaaaggaagaatttccatacctgccctctacccaatgtgtagacgaaaggatgagtgtccttttggtgtgtggagagctttgatggggcatgtgatgtgtagggcttagggggtatgctggggtggctgggaaaggtggttgggtgtcctgggaaggcttttatagacactgcgtggcaggcctaggactctaagtgcttccagccagctgtacatacgtatatatttttttttcttttttttttttgagacggagtcttgctctggagtgcaatggcatgaacttggctcactgtaacctccgcctcccaggttcaagtgattctcctgtctcagcctcccaagtagctgggattacaggcacctgccaccacgcccagctaattttgtatttttgatagagacggggtttctccatgttggtcaggctggtctcgaactcccgacctcaggtgatcctcctgcctcggccttccaaagtgctgggattacaggcgtgagctaccacgcccagccccagccagctatattaactcaatggaattcttgttgaggactaaaatggagtttttgttgaagactaaataagtaaatgacagtggagtattgtcattatccccattcaatagataaggaaattaaggtttagagagtcacagtaactggtcctggctacacagccagtcaggagcaaggctaacatttaggcctagagtgctctcctaaccgctatgcctggggtgaggagggaaaccttccatccttgtgtcatcccatttgatatattagttactgaagctgaagctaaaataatccgagggctgggcgaggtggctcatgcctgtaattccagcactttgggaggccgaggcaggtggattgcttgaggtcagaagttcgagaccagcctggccaacatggcgaaaccctgtctctgctaaaaatgcaaaaattagctgagcgtggtggcaggcacctgtaatcccagctactcgagatgctgaggcaggagaattgcttgaacatgggaggaagaagttgcagtgagccaacattgtgccactgtactccaccctgggatacggagcaggactctgcctaaaaaataataataatagtaatataataataatccgagagtgcttaccatgtgcctacattgttctgggatactgagatgaataagacctcttttgggctcttgatgacttggttataagaagaggcagctcggttcccccagggactctcaacagttagggacaggctggggcatggtggctcctgcctgtaatcccagcacttttagaggctgaggcaggaggatggagtatgtccaggagtttgagactagcctggacagcatagtgaggtcccatctctacaaaaaataaaaaattagctgggcatggtggtgtgtgcctatagtcccagctactcagtaggtgaaagaggaggagatgggagaattggttgagctctggagttggaagctgcagtgtgcagtgatcacaccactgcactcagtctaggccacagagtgagactgcctcaaaaaacaaaacaaaacaaagcaaaaacaattaggtacagaaagggaggagcatccacattttctgacattgtttattgcttttttaccctcatgttctcccctctcctggcattgcctggcacttgggagaagtttcataaatattggtcgaatgaatgaatggatattaaatcatttgtgttttcttttgtgagttgaaaccgtcttcaaatgagtcttcaaagtgctctgattcgtatggtggagtgtgatgaagttaaactctgggttgagaagagaggaaatgtgagttaaggaaataaagagaatggagttgaatgttcagaatctttggagtgctgtcagggatccatgattctgaattcagttatcatctttggtgtgagaaatccccaaagattcaaacttgtcaccagaaaggtggtcttaggctgggtgtggtggctcatgcctataatcacggcactttgggaggccaaggcggctggatcatttgaggtcaggagtttaagaccagccggtccaacatggtgaaatacaacatggtgtattttgtgtctctattggaaatacaaaaattagccgggcatggtggcgggtgcctgtaatcccagctaccagggaggctgaggcaggagaatcacttgaacctgggaggcggaggttgcagtgagcggatattgtgccattgcactccagcctgggtgacagagtgagactctgtctcaaaataaataaataaataaataaataaataaataaataaataaaagatggtcttgaggtttcggtttgggcataggttaccttctgcagaatgcatgtgagtgatatggagacaagttttaacatgggcactttttgaaaacagacatcttaaatattggccaaaaggccagatgtcaaagtggactttctatttttgatggaaaatttcaagcctgttttctgtaaaggaatgattattgtacaaggatttctggaactgcaactggcccatagatggtggccattatagtagtttcctatgaaatctactaatgtacagcaagcagttctgtgactttcagtcaccacttggtttctttttttttctttttctcttgtggactacacttgaagattcttttttttttttttttttttttttttttgagacagggtcttgcttaggccggagagcagtggtgctatcatagctcattgtaaccttgagcttctgggttcaaatgattctcctgcctcagcctcctgaatagctgggactttgggtgtgtgccaccacgcttgactaatttgtttactttttgtagagacagggtcttgctatgttgcccaggctggtcttcaactccagagctcgagtgattctcccgtcttagcttcccaaagtgctgggattaccagcataagccaccacacctggcctgaaggctcgtttgtaatggcactcttaagtgagataaattgagtattttcttcctcacaaccttcttatgcttgtctgtagttggctgtctcattttggacaattttgattgtcggcttggctcttcaactgcctgtgttgttgtattcttagaacacacagaacaaccaggtctgggcttcttatcttgcgaggcaggtgaagaaagactaggaacaatgtatttgggtgcccacctcataccggccatgaccttctattgaggaacagcaggtagatgaagcagctttctcatattacgccgtggctgactccaaacttgaactctggtctctgtttttggagcttgcttccttcctacgaccctagactgctcctcctaaataattaagtggcaaacatggcacagacagtaacctcacataagaagctatgaggttaggacagaaatatccactgctggcctgcgaactattcacacaggtctgactccccgccagagtcctggctgccctggtcctgtggaatcccgtcatggcttctgtctaaacggagcaggctcagggccatgctgaacttggagaaatctgtgcaggagtcagatttgggctttagagtcacctggggttgaatctcgggcctgctatttattgaacctgtcctagcctcaatcgccttatctgtaccatggggatgataccatctaggtcgaaggtagttgcaggagattctcatgcacggaggcccttggccgtcatttgtttctttgtctctacaagcagagaggctgagtcatacagatcctgaggggagatcactttctcttccctcctttcgtgtgtcatctccacctgggtgtggtgagccccaggaataatgctgtgacatcaagccccgtgaacacctcctttcacacggaccccgtgactggctgcggctgccagcggtgatgagaactgatgacactccagggctaccaggaacggtgtgtgtgcctctgggcagggccacttcctagaaccatggggctgctctgtgaagagaaccggctcccagtgagctccaggagacgaggagcaggtcctggtggcggaggtgctggcgcaggaggccggctcctggcagaatcggcttccagctctgggcactggggtgcggtgtgggaccagcaacaggctgctcctctgccaggaaccgccagaaccaaagtcttctcgaaggcatcttcagaaggcaagcacagggctgagcactccggagaggagcctttgggggaaaactttttctcggagcttcggagctcagggagtactatgggggagattcactaggttgatgctttgctgataggcagccctgtagagaagacaaggcagctgggcatggtggctcaggcctgtaatcccagcacttcgggaggccaaggtgggcggatcacaaggtcaggagttcaagactagcctggtcaacatggtgaaaccccgtctctactaaaaatacaaaaaaattagctgggcgtggtggcacgtgcctgtaatcccagctactcggaaggctgaggcagaagaattgcttgaacccaggaggtggaggttgtagtaagtcgagatcacgccactgcactccagcctgggtgacagagcaagacccaatctcaaaaaaaaaaaaaaaaaaaaggagaagacaaggcgacaactgtgagctttctgtctcctgtggagtttagcacttggtcaggtggccatttctctccctcctactcggtgaccttctcaagggcaaggggctccttgaagagtgtctttcacattgaaacatgcacagaatggtggcttatgacccatggtagaggcgtgaacttgggatgccactgtggacgtgtccccagcctccctcctcattggtgtactgatatcgtgttgccttggacctattacctcacctcttcctggtgatttcacctcaatatcccctttctcctatgcttctgtttttccttctacccttccatgtttttttctcccaaccattcttctgtattttattccacccagccaccctttcatctaaccagccttccacctagctaggcttccaactaactatccttttttattgagacagagtttcaagtggcacagttgggccacttgtttctgatgggagccacttctcaaacaggtcgatgactaggactttggacaaaagcatgggtgcaggctgggcgccgtggctcacacctgtaatcccagcactttgggaggccaaggcgggtggatcacctgaggtcaggagtttgagaccagcctggccaacatggcaaaaccctgcctctactaaaaattgatcaaatatagatcacccgtaattatcacccatcattctgacacttagcaatagtcacccttaacatcttgttgtcttgctttcagatggttttgtttttgacatgtttttttttttaacttatattatgaccatctcctctatgtcttttaaagttttaaaaacttgttttgaatatcttttccatatttcattatgcacctgtacaggaaaggtactccataagtaggtttttcttctctgtaaaatggggaaaataagaaccccttctacatggggttgttgcgaggatgaggtgaagaaagttgtcaaagcccctcgctagtaccaggcacagagcaggtactgggcgcatgttgcctgctactggtattattgtcattgtcattgctaatcatcagccaagtcagtcctgcggggctttcagatttcctctgcttttacctgttgcaaggtataaaccttttcatgtgtctctgattgttttcttggcagagccacccacaccccaggaatttaatagggtcttgatgcattcccagcttgctgttgaggagtatttaaccagtcaccactccacaggcaatattaggggttgctgaggcagcctccaatagtgtgagcattctaattactgcagcaaactcttttaaaaaaattttaacttttctggctgggcgcgttggctcacgcctgtaatcccagcactttgggaggtcgaggtgggtggatcacttgaggtcaggagttcgagaccagcctggccaacatggtgaaaccccatctttattaaatatacaaagattagccaggcgtggtggcaggtgcctataatcccagctattcaggaggctgagacaggagaattgcttgaacccaggaggcagaggttgcagtaagctgagatcataccactgcactccagcctgaaagacagagtgagactccatctcaaaaaaaaaaaattaacttttaatttttattttttagagacagggtctcgctttttcacccaggctggattgcaatgatacgttcatagctcagttcatagttcatagcttagacctcccaagctcaagagattcttccacctcagcctcccacaggtgcacaccactatgcccagctaattttaaaatattttttgtacacatgaggtctcactatgttaccaggctggtctcaaactcctggcctcgggcaatcctggactccccagatgctggaattatgggttgagccatagcctgcagcaaactcttaaaacatgaggggaactatcttgttataaagttgcttttctttgactactggtgtggttggccagcttttcatgtttatggcttatttgtgtttgttaactggtcatttcctttggggtgttagcaatttttttctcattgatttgtaagatctgtcttgattaacttgtgaattttgcagatggtggaaccggggtgccccacagtaagtcccctttgttaggcatcctgtccctggattcgacacctccatttctatgggggacatttctttacaaatctgcatctgattgtgataccaaaccatgctttgcaagtgaatacaaggatctaccccattaatctgggcagttgctagttttatttatttatttatttatttatttatttatttatttatttatttttccgagaccgtgtcttgctctgtcacccaggctggagtgcagtggcatgatctcggctcactgcaacctccgcctcttgggttcaagcaattatcctgcttcagcctcccgagttgctgggattacaggtgtccgccactgcgccagctaattttttgcatttttagtagagatggggtttcactatgttggccaggctggtctcgaactcctgatctcatgatctttctgcctcagcctcccaaaatgctgggatgacaggcatgagccaccgtgcctggccagttgccagtttttaatgttctcaggtgagtggcatttgccaaggaacttctctcttcccttctgtcttcataaacaaaaaatcctactaacttcaggtgtcagtttaaaagtcatctcttctgggagccccaccttaaacccctaaatcagctgttggcgtcgggggtggacttctcctttgttgcaccaattgcaatttcttacttaggtgtgtgcttgtgggaacatttttgtaatatcagcttctctgctaaggacagcgatcatgtctcttttatcatttggtatgtgttgctgcagcacttagcacagtgcttagcttggaagccaaagcccagaggggtagaatgacttgcttgaggcccctcagcttggacctggcagatctgggacccggtgtctgggcccaccttcaagctggatccctcaggaccctgtgtacctgtggccagggctttgctttggtgcctggatgagagtggtaagagttgctgaggtgccaggcctttgcccccatgcccgctggcatcactgattccaggttattttggctcagcgcggatggagcgagatgtaggggaaaggttgggaccggcttccaggtgattggcacatccctgccctaaaccctgcatggctttcctgggcctgccatccaaggggaaagaagcctctttcctcacaagctgaagcttgaaaccaatcaagctccaggccagagaagctgcaggtggggtgtggtttgcagtgggggtggggcaggaaagaaaggttacgtggggtgaaggggtcaggtcaattcagtgtgggttggaatgctggggtcctgggtgagcagggatgaaggacacctggggaggggagagagcctgccggctggaactggggccctgccagtcccccgctgcatgagtctgggcatgcttccaatctctgggagcctcagcctcctgtctgtaaaatggagctaatgaggcctgccgtcagggtttgtgggcaagattcagtaactggatgcctgctcctggcccttggcaagcattcaataaatgttgatttctctcccacccctcgctccttctcttattcttttcctgttgcttttcacacggacatgtgttgaatgtggcaggatatttctttcttttttttttgagacagagtcttgctctgtcacccaggctggagtgcagtggcgcgatctcggctcactgccagctccgcctcccgggttcacgccattctcctgcctcagccccctgagtagctgggactacaggcgcccaccaccacgcccggctattttttttgtatttttagtacatatggggtttcaccatgttagccaggatggtctcgatctcctgacctcgtgatccgcccgcctcagcctcccaaagtgctgggattccaggcatgagtcactgcgcccagccaggatatttctaacacagagaaattctcagtggaggccgcgggaactagagatagaggtcctcttgcctaccaaagcaccagatggaggtgacagaggccatcttgtcctagagggacctggctaagaggatctaagaccagaactagtctgagtgcttgggattcatatggggctgtagacggcaggcctgcttgaacaccagtgttccaatcccacatctcattcttagagctgtgtggccctgggcgagtctcttgccactatttcttcatcctgaagtgggcaccacattactgcacctcaatttggacgaggattctcaggatggggaggtggttgaaatcatccaggggtcactggaatcaggatggtcctggctttttcagaaggacaaggtggtaggtgccaatctgggggctttgcagatattgaacggcagcctgaggatggggataaacctgggtgtggcagacagaattatgcttcccccaaagaggttcacatcctgatctctggaacatggggatgtcatatgccatacagagaagggaaattaaagtcacaggtggaattaaagctgaccttaaaagagggagatccttttagattatccagagggcccagtctcatcacagagtccttacaagtgggcgagagaggcagaagaagggttcagaaacatgtgaggtgacaagtaacattgctggctttgaggatggaggaaggagccatgagacaaggaataaccgtccctagaagttggaaaaggcaaggaaataggaactcccccagagcctccaggaaggaacacagtcctgctaacactcagtgagacccactttgaactttgtatgttcagaactgtatcataataaatgtgggtggatttaagcctctgagtttgtactagtttgttccggcagccctaggaagtgaatgcaatgggcgcagcatttgatggccagcctggcatccagcctgtggggagtgggagctgagggcagtccaagggaaatgtcctttgagtgtggcaccggcaggcaaacccttgtttgggtgtgatcatcagtgagttgggccactgaagctgcctggtgacctggcagggatggcttaagtaggcagggtttgcagatcagcgagataaaggggcttgcataaattcacatgcccatggcttctccctctgacagcgcagccctgcctccggctgcctggccaggatggcgtgttggtgcattagggaccccttcctctcctgccctgctgtttaaattgttggtctgttggcgttctcaggagccctttaccagtacccttaggccccagacgacctactcctcaagctgatcatatctgctggctgtgtccctgctctgggcccagcaccctcatggttttccataacacgtatcccaactcctgctgatgggaccctcgtgagctgtctgtgtagggagcatggctgcccctgggtctgctttcctgcccctgacccacaggaataggatgtggcagagtgggggccagatgacagagatgctggtgctctctgagctgaggcccactgctgacctgctggtggcttgtcctgctcttggatcataggcactgggacatcctgccttccttcagtgtcccctcccactccctctccttcagcatcagaggaatgaaggaggcctggaggagtagcccctatctaatagagacaggagtgggctgggtgagcatggggtggtcgcagggggaaggggataggagatggagagaggaacctgctatctggtgggttccaggatggtgacagacagtggcagaagcagtgcagagaccttagtttgtgctggaggttcagttaatcactggtgaaggcagacatcactgcaggagaccagactgttatgtattgtctgtgcattcatattagtacacagggaagatcttgggctccgagacctaggcagatcttgcctcccatctgccgaccctccgcagatgctacacattatgccaggtaaacacattatcaaggagccttgggccgtgttagaggaaggctccttgtgcctgtgaggagtttgcactaatgctatgtgtgtttgtgtgtaaggcttgcattcactgattcactgtagaggatgacttgaaacccaagtcatcagctgggcagtgcatgggctgctcgcctgaatggtgaagctctaccaagtggtttccacctagggcctggcttagctggcctcagatgcccttctcagttctgctcaagacctgcctgcggccttcctcgggcttgcttgcccagaatgctaggaatggccagggatactgcctgggcatgtgtttggcctcagccaaggtcaggctgtcaggaaggaagaagggggaggggcacacttgcctgggagggtggaggaggaggggtccaagccgccacagcctggcagtccttttttgtgcaaaggagacccatcagctcctctgcctggaacacccccatttactcctccgcagttagaggggtgggaggtgaggaattttgtgaggggaattatctctgatcttgatgtgcacattcctcggcagtatcccgggcttggccagcttgctgacacctggctggaataacaatgagcgatgcttctggaggatgctccgctggggagggctctgctgaaccagcacttactccctgcttttcgatcctcactctgccttcctgtctgacaaaggccgggctgttgggatggtaatgccctctgggctggccttgattgaaggtaaaaaatgaacttcgaggatagcccctgtggctgtgcagtctcattttttatgcagatatgttgggggatgcagagacatggtggcgggtggggtggggagaaggggactgggaaatctgagacctgaagctaagatctgagatgtcatcctttatggagcatctccggatgaaaatgtcccagaggccctaggtcactcaccctctgccccctaataaaatcactgttgctgcctcctgctgaatctgaagtatgccttcactgagggcaggacgtccatctcaactattatcaaaggaaaacataacaagaggcaacagcacagcccccggggcatgaggctccttcctctgtgatccctctgtccttgtctgccagtgtttttttccttgacttttaaaataatctttttcttattatgaaatagatatttattttgcttaacaaagaattctgtagtccttctagaagctaggtaactcttctaagtcctttgcaaatattaagtcatttaatttaatcctagagcagttctgcgaggtggtgggaagacctagagaggttagggtccaccttagcactagctctctgagctataaggcctcagggtctgtggcattccctactcactgaaaagaagggaatttaaaacatgagttccaccacccagaaatgaaacagtgttcatttccagaatccaggcatatggttgattttaccaatttcctgtcacttgaatcacagttttttttgtttgtttgtttttgtttgagatggagtctcactctattgcccaggttggagtacaatggtatgaacttggctcactacaaccccgacctcctgggttcaagcaattttcgtgcctcggcttccagagtagctggggttacgggtgcatgccaccacacccagctaatttttttgtatttttagtagagatgggttttcgccatgttggccaggctggtctccaactcctgacctcaggttatccaccctcagattatccaccctcctacacctcccacagtgctgggattacaggtgtgagtcactgcacctggcccacaggttttttttaatagtcctgtgtgtataattttgcatcctattatttctccttccttttaacatatatatatatatatatatatacatatatatgtacatatatatatatatgtatgtattatctctttactttttaaaagtttctcagactttaagaattacttaaaatttcccaaaacaaacccacaggcactgctgtgatcttcaggcacactttggtattcaggagttgcttctgctggaccaaagtcaataacaagtagcttaagaagctgtagatggcagagataatattgactggaggcttaggggtctggttcagggtggactcaacaattttgcaagttctatattgttaaaattacaatgaattatttataagcagttgttagtaaatcatgaagttggcattattattctttatttatttatttattttgagatggagtctcgctctgttgcccaggctgaagcgcaatggcatgagttcggctcactgcaacctccacctcccaggttccagtgattctcctgcctcagcctcctgagtagctgggattacaggcatgcaccaccacacccggctaatttttgtatttttagtagagatggagtttcatcatgttgcccaggctggtctcgaactcctgacctcaggtgatgcacccacctcctcctctcaaagtgctgggattacaggtgtgagccaccacgcttggcctattttttattattaaaaaacaaaatgatgctgatgctttcaaatatgtattgcagtcttattacttagtattgagctttgcagtgttggactaatatcacaagtcgaagggacaaagaagatggtagacaataccaactgtttcccattaggctctttccctcctcttgtttttctgagaccttaagggcctggttgtttctactgttccctgctacttcataacctgcaagcttgagaatgtttgtcatttacaaattttaccttatagtagaagaacatagtaaataattgtaccagattgagtagtgtccccccaaaattcatgcctgtatgaacttcagaacatggcattatttggacatagggtttttgtttttgtttttgttttgagatggagtctcgctctgtcactcaggaaggagtgcagtggcgtgatctcggcttactgcaacctctgcctcctgggttcaagctattctcctgcctcagccgtccgagtagctgagattacaggcacccgccaccaggcttggctattttttgtacttttagtagagacagggtgtcaccatgttggccaggctggtctcgaactcctgaccttcagtgatcctcctgtctcggcttcccaaagtgttggggttacaggcacgagccactgtgcctggtggacattgggtctttttagatgtcattacttaagatgatatcatattggattagggtgggggctaaagccaatgacccatgtcctcagaggagaagagagggacataggaaagaaggatttgtagagatacagggagaaggccatgtgaccacagaggcagagattagagtgacacagctacaagccaaggagctccaaggattgcaggaagccaccagatgccagaaagaggcaaggaaggatctttcatggagccttcagagggagcacagtcccgctgacaccttgatcttggacatctagtccccagaactgtgagagagtgcatctgctgatgtaagccacccagtttgtagcaatttgttatggctgccctcagaaactaagacagtagccaacacagaaccaaataccctttggggattgagggaagtggagcgggagaatgagcggcactccctccctttacataggactacttggtaaatatttactgaatgaaggaaagctgaagtatctgtagaactggccatttcattctgcatttagagctctgggagctcttgaaatgtctagacaaacatcctcttcagctagaggaagctccttctcccacttactagctatgagatcttgggcagatggcttaacatttctgggcctcagtgaccttacttgcaaagttgtctgggtcaaggcaatgattaaatgcgatgatgcatgtaaagccccagcatgcagcctgaaaatgtgagcccttattatttatactgtttgccaaagtggtgagtagtgttgctgaatatgccgtgtgtcctattaactctgtgacggccacagtcacgtctcctttctgcctcctcctcctcctcctctctgtccagtgactagggagggcaggaagttcagagggtgaaatgctgaattaattcctgtcctcctggtctatattccagatcaccctgtgggtgggttgaaaaccatgccctgtctacctcctctgcaaggaaaaaataaagacagagagcaaatctaaaacacgcaatgcagaggaatggttactgcctgctgtgtgcctctccagggagcaccaggaggggctgtgtgggacagggacactgcgtataagtgacactcctccacattttggcctggagttagcacatacaactgcctttttgctgacgcgatgcccaggagccctctcaggggatggcaaatctcagaataaatgtgttttttactcatggaatgcaggggaatggatatgaaaacttttgtatcaaatagacattagcgaggagagggatgcttcacatcctaggtttgtgtgatgtcggcacagctgatgaggtctttgcaaattttgctgctgaggaagggatgcgctggactcccagtgtccaggggccctctgcttgtctgtccttaggcagagtccaccagaatcgggtaaagtatgtgactgcctcttagtgtagggcatgacgtcaactgtgaggagaagagatcaagatacagctctttggtggtgttttttgacccatatccaggaactgttcccacacccagagaggaatatctgcaagttctggtgccagatgttgattcaaaaacaaaacccagcgaagcatctgtacttttttttctgattgtattagaagtacagtccacaataatatattgtacatttaaaaataactggctgagcgcagtggctcacgcctgtaatcccagcattttgggaggccaaggcaggcggatcccctgaggtcaggagttggagaccaacctggccaacatggcaaaaccccgtctccactaaaaatacaaaaaaaattagccagacgtggtgatgggcacctgtaatcccagctattctggaggctgaggcaggagaatcacttgaagccgggaggcggaggttgcagtgagctgagatcatgccattgcactccagcctgggggacaagagtgagactccgtctcaaaaaaacaaaaacaaaagaaccctcaaaaaactaaaagaggccgggtgtggtggctcatgcctgtaatcccagcacttggagaggccgaggcaggcagatcactgaggtcaggagttcaagaccagcctgggtaacatggtgaaaccttatctccactaaaaatacaaaaatagccgggcttggtggtgggtgcctgtgacccaagctactctggaggctgaggtgggagaatcgcttgaacccaggaggtggagattgcagtgagctgagattgcgccactgcactccagcctgggtggcagagagagtatccgtctcaaataaataaataagtaaataagagtttaattggattgttcgtaacacaaagaaagggtaaatgtttgaggtgatggatgccccatttaccctgaagggattattatgcattgtgtgcctctatcaaaatatctcatgtaccctataaatatatatgcctgtgtacccacaaaaattaaaaattaaataaaaagttcattaaaaataacttcaaacactacagaaatgttaaaagtagaagtgacctttccgtagaatgtcatgcctgtactttggcagagaatttcaatggaagcatccagaaaaccctggctcggaatctgagcttgattatttcagtgtttcaggtctcacatgggggacagtcttgccactgtcaaaggccatcatgagagttacagcagacttttgatgaaattatgtccacagtggtccctggtcctttgtggtttgagatatattctttgtccccacgcctgccccttgcttcagatcttctaggaatccagatacattaaagcaaagtgacgggacagccctgtccatttcctgatctgttgctgactgtaccactgagctgctctctcctactgagccccgcatggttcctcctgttttcctgccctctcacttgctggtgttggcctgctctggctgttctgcttggggttaggtgaggatatggggcagaaggcttccagcctggagcgcctatggtgtcccaagacaagggcctgcctctggcctctgggtgtgtcctcctgcgagttttagagaaatctgggcaggctcagactgaatgcctgcttctccttgcagccttctgaagattcccatgacacacacctgatttaccttcagctcttttacttgctgggtaagcacagccctggattacttggcatctggaattaactgaagggtaacactttcttaaccttatttggaaaatgaataggaaggagaccccttctaacttctggaagcacaaaagtgtgtttatccttcaggagcattcttggctgctgaaaaatcatcatggctagctttcactttcacgtattgagctagtaggtggtatcaatagtagctaatatctatttcatgtttttttgtgtaggagggacccggcgtgcaatttgcatggattgtctcattttatcctcccagcaggtaaaagagctgggagggagtaaagggagttgttaatttctgagaaggaaggtgaaacttaggaatgttaaatacccctcttggtgtacacagtatgcaatggaggcagggtgcaaatgtgctatggagatttcagagcctgggcttcccagaggaggcctttgccccacagaatctttgctccatttctccactttgctgcctctatgaatcaatgattctgtgttgtccatttttcctttgcaatcttttgccatctcttcattaaaaatggtctccatcattctggccaagcacagtgactaacatacaataggtgtgcagtaaatgtctagtggatgaatacccagtgtgaacattaattgagcaccactagctgccaagcagccaagcaccctatatctgggagatgtagaatttaaggctgtgtagtcactgtcctcaagctgctcacagctttgtgtaagacactcaagggaacatgcaaagctcagggcagctcaatttggggcgagggttatggagaaaatacagtctgcatgcttttagtacatgcagttctgcatcttggggtgcagtgctagagtgaatgacacagtagaggtgacaggcttaggatttaaatttgataatgtcatgatgccatgggagcactggagaaggggcagcagtggattcagctgagagtcgcaaggggttaatgagaagattgggaaaggctgcacagaggaggagaagggctttgtaggatgagtagaggttcaccaagggtgggtaacagttagaggaacagcaggtacagaagcccagaggagaatcagtgaatgacacatccaccatgtccagagatcagggatggttgcagctgaagctaaaagtgtaagagcttggactgtggatcttcaatcccagttcatcttattcccacccatatggctggtgctatggttttgtcacctgtaacacaagtatgagactggtaccttcctaggaggggtgttgagagtctgagccacactcaaattcttggtgtgcagtgtctctgatctgaaatgtgcaccgtgaatgttagcagtgggtattacctttggcctgattgtgaagcgggtttgagacagaagtgaagcagttcaatttgttgtgtgatcttcttcttccccaaaagaaggttttcatcctccttaaggcttttgcccacccttcccttccttcacatccctggtgggtacccttcccacctgcaggaagcctactgatctttgagttttggcctgccacctggcccttccctcgctctgcagtcttggttggcctccaggtgtgtgtgtgtgtgtgtgtgtgtgtgtgtgtgggtgtgtggccctgggctgcactgtgcctgctggagcaggtgcagttgccctttcaccatgcgtgcttctttggatgtgaccccttgggtgcctgtgtatttagagtggaggaacgtcctccactataatgatgagaagtgtcattgctagttgcactcagttttctatggtgtttgggggagaaattggggtgctggattttggttttaactctttcccaccttaaccagtgactgtggaaagttgcacatcgtccccttcctcacagctggggtctgttcttcctccgggtgttacggtttgtgagagccaggagggtacacagaggtggcctgatttctggagccatagcaagaagggagaggtgtgtgtcctctctgtctctgtctctgtctctgtctctgactctgtctgtctctgtctctgtctctctctctctctctctcttctttctccctctccctttttcacatgttgttttctgattataagaggaatacttcatcattagacatatttcgagcctccgttcctcatctatgaaataagcatagtaaaggactgaaggatttaaagggatgtggccaagtgtgcaaagtcatatgtgctcaataatttattttccttgttttcttttccatttccttcttctcctctaaggcgctccacatctccgtgatatagcgtgtactcctttcctcattttcttttctctgagacaaagggaagttcctagttctgctatttcctagttcagtgaccttggacaaggcaccctggggagccttagctgctcatatgcacaagcttctagcaactgcttccaagggaagggtggggaggaagggagaccctgagtgtttggaccccgcctgtgctcagcacagaatggagctcagtaagggcaggtcgtgggctccttcttctccctttcagcaaccatcactcgtattcttttttatctccaaggcctcatgctggaaagagattgattgctctctgagcagtaagtcctctgaaacagggtttctctggggagttctgtggcacccctgccttacctgggggacctggcaaagaggcaccctccaccccccctcaccctcagccaggtttactgaacagagttacggggttgggcctccggatctgcattggagcaagtccacaggtggtgcttaggcacactcaggtttgagagccactgacctagaggggaagactgggagaagccttttaagagaccagtactgtgacttgcaccatggagacacctggaaaacatacagtgattcacacacacgccccaaacagcagtgtgtgtgtgtgtgtgtgtgtgtgtgtgtatgtgtggtttcacacttggtttgctatgaatgctgtaatgccacccagttcccacagagctctggggactcaggttccccaagtcagggttcttttctggagtgctattctgacaggtttttatttttatttttttaattattttattttatttttattttattagtattattatatctgacaggtttttaatacagtgaatttgtatgtctcctgtgtatttattttagctgctcccttctttccccttctctccctttcctctcatctcctcccgctttcgtcctttacctttccctggatgatattagcattacccgtacactcttcccatctcctggcccctccagttctgaagggatggggactaagtgggatctgtcctctaagcaggcggaggagggaaccatgtcagctcctaggtgcccccagagcacctgctgccagttttccacaactcctgtcctccgtggcgcttgggtgacagcagagcagagccgatgtgcctgctcctggtcatgggctgttcgtgctgtcatcgctttcatttgccccatccccccaatttggacttacccagaatccttgggcaagctagatggctgccaaagtttacttagcgagatgtgcctgcgtgacttgagtagagacctgcttctgagaaagtcagaagtgcattccaaagtcaggagcgtgacctccccggaagcccagctaatccaggttttaaagaggagttggaacaaaggtggtgcttatgggatgtatggagctgtgggatgtgggagaggacaggtttagcagagtggcgtggtggaaagtttcctctcgccgaggaggacaactccccagcgcctgagacagcgggagctcagagcgcctagaatgtgcccagattctaaagtgaagcaggctgtggtgtgatgatggcccccgaggggacttgcagtcttatggacctgggttcaaggccaccctcttcagccacacaaactgggcaaggggcccgcccttttcacgctgctgtttctgtaactttcagatatgagacctgtctgtggggttgtgaggatacatggggattaagtgggaaattaaaagggttttctttgtgactggtgactgataaatgccatttcctttcatcctccttattttgacattagccccaacctctaccccgagggtctctctctctctcttcccaacttagattcctctcaggggacacatagacaacccagaaaagcagctctgatctctcgtggagcttccctgaactccacaccgcacatctactactgtttaggataacattttgacttagtccttaaacggactatttctcatagtcctgttttgtaaatgagattttaagctctttgcagacagggaccagtataaactcttgagtctctgtcaaacttagtgaactttctttccagcctgggcaacatgatgaaaacctctctctacaaaaaaaatacaaaaattagcagggcatggtggctcgcacccgtagtcccagctactctggaggctgaggtgggagaattgcttgagcctgggagtttgaggctgcagtgagccatgatcacgccactgcactccagcctgggtgacagaaccggactctgtctcaaaaaaacaacaacccccctcccccacaaaaaaccttactgaactttcttggagaacatgcacactgtagaaccttctgtatttggaatcttcaagtgcaggtcctgctgttctgtaaagaactgtcaccttgagtcattgtttgacggctcaggtccttggcactttacccctttgttcatgattgattgacatttggacctttgctgacctttccctgagggattttgtgggcatagtcaaacaaaaggaaattgaaaaaaaaaaccccacaaattttgaaggtctgtcacttggagaagaacagtgttcatgactcttcttcgtcatttcagcatcttaatcatcttgagcctaaagatgaaggagagtggaggtgagcctgattaaatgggagcttttcctatattgaggatctactaggtgcaaggacctcacttgggttatctctagccttcccccaactctgcaaggcatttcacagatatggatgcaggttcaaagaactgaagcttaaagcttcgcagatttggaagcctcagagctagaattctccccctagcctgtttgtctctgaagcgttggttattgcttgacattgcatccctccctcttttttccctctcttcctctttcccttccctgccactgtctgcctgtcttcctgtctgcctctctttctgtcttaaaattactgttgctattccttactggtctggtctggtctagttaattaaaaagaaggctatcgtgaggtaaccctgggatccttattggcacagtcatattcccataacttttaggtgcctgagtcctaatggatctgtaagacagtgcccatcagcgagaaatacccacagcctccctggatgctgcccacaggcatcttgcagatgagggtgtttgccttctcacctgcaagggggtggggagaagtggccaggggtgggctgttctggggacgcctgcctccccactccctgagcctagggggaatgatattatggcttcaggccacaactagacacattatctactctgacagggagccagtctggagaaggatgtcatggatgacgtgaagaaattactgagggaaaaagagcaaggcgtgagccctattggggctgttttggtcaactcctggcagtagatgatattgatgctttggaaatctctattttccttgcatttcccagcaaagtgccattcccatctctttcttttagaagcttcttatcctatggctctgcctccagtctttctcatcacataattcttcaaaggcaaggcagactagtggttaagaacaaagacccagggctgggcgtggtggctcctgcctgtaatcccagcacttcgggaggccaaggccggggtatcagttgaggtcaggagttggaggccagctttgccaacatggtgaaaccctgtctctgctaaaaatacaaaaattagccgggcgtggtggcaggtgcctgtaatcctagctacttgggaggctgaggcaggagaatcacttgaacccaggaggtggaggttgtagtgagctgagatcacgccactgcactccagcctgggtgacagagcaagactctatctcaattaaacaaaacaaaacaaaacaaacaaacaaaaaagaacaaagtctccggaggcagtgcctgggctcgtatcctagctctgtctcttgctgactcctgcatggcttgggcatacttgggctttgctgtgcaccagtgttctcgtttcttagtgagttcgtatctcacagcattgttggagattacaggaacacaaccaatgctctcagaaccagcactcaggaagtgtggtaattacatgctcttctgggcttctggtcatgccaccttcgacggacaatgcgccagcacccaccagtttaaggaccagttcctcctctaggcattgtgcccagcgcacccttctcatggagatttgcttctcactctgcatctgcaggtcttcgctgggtgatcttgggcaagtcactttacttctccaggccttacttctcagctcttcagtgaggacattgaacgagattatttccaaggtttcttgtgtgctgacgtactggggcctctcacattctatgtggtccaacctttcctcctgttcctcagcttctgccagcccgccagggcaacctggttatcaacaaatgtcctcgcttatggacatgtcctgcttctctggaaatcttagtacagcctgaaagctccatgaagtcaggattgtgtctttcatgtttgatatgatttctggcttctagcactgtgctaggagctagcacgtgaacactgtctgtgtagctggaattaatcacccactattccagtcaacaattccttttttctttgagacggagtcttgctctgtcccccaggctggagtgcagtggcatgatcttggctcactgcaacctccacttccgggttcacgccattctcctgcctcagcctcctgagtagctgggactacaggcgctcgccaccacgcccggctaatttttttttttttgtatttttagtagaggtggggtttcactgtgttagccaggatggtctcgatctcctgacctcatgatccgcctgtctcggtctcccaaagtgctgggattataggcatgagccatcgcccccggcccttttttttttttttttttttccgagatggagtctcactctgtctcccaggctggagtgcagtggcatgatcactgctcattgcaacttccgcctgctgggttcaagcaattatcctgccttagcctcccgagtagctgcgactataggcgtgcaccaccatgactggctaattttttgtactttagtagagacggggttttgccatgctggccaggctggtcttgaactcctgacctcgtgatccacacgcctcagcctcccaacgtgctgggattacaggcgtgagccactgcgctcagctttccagtcatttcttaagcgatgttgagttcccaagcactgtgccggacacgcatgggttgctggaggctggcagaacccgaatgtcagtattcctgaagaatggctctaagcaatgtaccttgcagagctcaagcagggctctgctgcatcatgcccatgaaggtgcctgctggtagaaggctggttctatactggctgcttgcctcctccttgtggagacccacattgtgtctggcaaagtgcagaaggaaatcaagcccttaataacattagggaactggactgggttcggtttgcatctcccgagtctgactcgtgggagtaaccaccataatagcagcgctgtgctgttgagggtgactttgactatctgcttgtgttgtgagcccactgtgtgccggagcactctctatacattcagtcttgtccgcagatgaactccagtggacacatgtttctattccttattattattattatcatttgtttttctgagataataataataatattattattaatattattgttattatattattattattattattattattattatttcagatggagtttcactcttgtcgcccaggttggagtgcagtggcacaatcacaatctcagctcactgcaacctccgccttctgggttcaagtgattctcctgcctcagcctcccgagtagctgagattacaggtgcccgccaccacactcagctaatttttgtatttttggtagcgatggagtttcaacatgttagttaggccggtctcgaacttctgaccttaggtgatccacttgccttggcctcccaaagtgctgggatcacaggtgtgagccaccacacccggcctattattattattttttgagacagggtcttactttgtcacctaggctgttggctcactgcaacctccactgacttcctggactcaaggaatcctcttacctcagcctcctgagtagctgggactacaggtgcgccaccactgccagctaatttttgtattttttgtagagatatggtttcaccatgttgtccaggctggtctcaaactcctgggttcaagtgatctgcccgcctccaccttccaaagtgctaggattacaggcatgagccgctgtgcccggcttattctttgttttattgaacagatgaggaaacactttcaatgagcttaagggatgtgcccaaggccacacggttgtgaccacagcatgaggattcacaccttggttcctgtggctcccatcccccctcccctgaatgaggaatcgggtgagtgtgacgggagcaggcactcgaaggcttgggaattccaaagcagctgatccatgtcatcccagcacacgttagggaggaagtgaaacgaagcaaaaatagagcctgtcagcggggggacagctgccgctttctctgggaacagatctccccgatttatcttccaggttaggaaagccccagctcctggggtaccacagagaaataatgtgagcacagccagagaaattgccacctctcccttcctcagaagaagataaaggagacatcgtctttttggcatcagttttgaagaaatctttttttttttttgagatggagtctcgctcctgttgcccagcctggagtgcaatggcacaatctcggctcactgcaacctccgcctcccaggttcaagcgattctcctgactcagcctcccaggtagctgggattacaggtgcccgccaccacgcccagctaatttttgtatttttagtagagagggggtttcgccatgttggccagtctggtctcgaactcatgacctcaggtgatccacctcctcggcctcccaaagtgctgggattacaggcgtgagccaccacacccagccagttttgaagaaatcttacttcacaatcctgagagaaagagaaattgaggcacacttagcatgtgagactgatttctcacttctgctgctacaactgctgccccattgaccgggtctcagaggtgttataattaacatcctctgactcttgctggtactaaaattaacaacatgactggtcccttctgcaagagagggaaagagatacacacatgtgcacatacacgcacacacatgcctgcacacacacacttgcacgcacacatgcatgcacacacatcacacacacacacacacacacacagacacatgcggagtccagaaggctcagagacagagagagagagaggaaggcacagccacacacacactgggagacacttattatggctccccctgcaaacggtgctcccctcaaagctttaggaccagggacgccttccctcactttctgtgttctgtacctcataccccatttaccagcctgtgccaaccctgtatactttaagtcttcagttaccaaagcatccatctgcccgtcctatattgagggggagtggatgcgcagaggtggtctgttggtgttgggtagggaatagacgcagcctgtttttcgtttttcttccaaatgtcttcggcagggcctcagctagtggaaatacctggtggggagggtcaagaaggaaatgacagtggggggaatggggagggatagcattaggagatatacctaatgttaaatgacgagttaatgggtgtagcacacaagcatggcacatgtatacatatgtaacaaacctgcacgttgtgcacatgtaccctaaaacttaaagtataataaaaaaaaataaaattaaaaaaataaaataaaaaaagaattcctattttaactttggaaaaaaagaaaaaaagaaggaaatgacagatttggtcctgacagcctgggaggcagagaggagagagatggagccaagagaatggggctggggccacgttttcttgtggggcaattccgtgtcactgggccagagcatgcttattgtgaagacttcccctcagtgtcctctggggaagggtcagctgtgaggcagtggggcgtgagaatacgatgaaacagggaaacctggaagctgccgattcccaggccttgaaggggtgttctgatgtctttgacattccagcaaacatattttcacaggaaaactcaaaaaatataaactccctttttatagaaataatgtgcatggagaaaagtgcacatgtcatatgtgtatcgatagcttgacgaatgttctcaaactgaacctgagtgtggagccagcacctggatcaatagaacatttccagcattttggaagccccctcccagtcagtcactcaggagaactttgtcctgacttctaaccacacagattagtttaacctgtttatgtacttaatctaaataacatcatcacacactcccctgtgtcttgcttctttcactcaaaattatgtttgtgggatatattcatgtggtacgtgcattttcagatcattctcactggtcgctagattgtgtgcatattttaaaaaatccattctactgttgatgggcatttgagtagtttccagtgtttggctgttatgaatagagctgctgtgatatccttagacttgtcttctggtgaacatatgcacacatatctgtgcattgataccacggagtggagctgcagggtcatagggtttgggtatattcagcattagtaaatagtgcagaacagtttcccaaagtggttgtttatcctttttcagagtgtctgttcaccagcacgtatgaattccagttccacatcaaagccaattattggcattgtgtggtttttaaattttagccaacccattacagaaagagcaaatgaaaggaatctaacagcaagtaatcaggagagaaaagaaaatgctccctgagaaagcattatgatttcatgatacgggaaatcccggtgtacaatgccacacattgtgtacttttgcaggcggagggcgaggtgcagccaccttcttgtgagcatcagggcagtccttgccattggtcagggaccaccacttgactgcagtaatacccaacagaccatgtcataattcttcctcaggtgacagagctttaatggatccgaccccaacagaacaaacttggcttcagacttgcctgtgggcctcagtaaatattcaacagactgtgtcccctgttcactcccctgtcattagctgaggctggtaccataaatcacagctccccttcctgttgtaagtggcccctctcagctgacggtactccagtcctgacattcaggagcagtgcctctcctgggctgcttcccagggctggcaggtcttggtggtcacttgtaggagccgaggagtgagtgtgtgcagtcctggagtcactgctgtggggtgacttgcaggagcctcttccatttgatgtgagaatgatagatccgtcaagctcttaatatgtgcccagcaacatgctaagtcctttatgttgtttattgcaacctgtcacagtccattcaggctggtataacaaaccaccttagactggtagcttgtaaacaacagaactttatttgtcatggttctggaggtggggaagtccaagattaaggctcagacatatttggtgtctggtgagggcctgtttcctggtttagcaatgatgccttcttgttgggtctttatatggtgaaaggatcaaataaggtattttatacctcttttataagggcactaagccctccagcctcatgaccgaatcacttttcaaaggcctccccttttgagatcatcaccttggcagttaagagttcaacgtatgaatttaggggtcgggggtgtaggtaacaaacattcaaaacatcatacaacctcacagtagttctatgaaatgagtagatgttgtttaccaccattttcagatgaggaaattaagggttaaaaacatttccccagagtaagaaacgtagtaaatttgggagtctaacttcaaactgtaatttttaattactgtacttccttcttcttttctcttaggggctgtttagatacttgagcttccttttgaagccatcttcctcttgggtctaaaagctttcaggtagatttaaatgggacaagaaggccagatgcagtggctaacacctctaatcccagctatttgggaggctgaggcaggagaatcacttgaacctgggaggtggaagttgcagtgagctgagatggcaccattgcactccagcctgggcaacagagcaagactctgtctcaaggaaaaaataaataaaataaataaataaataaatgggacaagaggaagtgacctgcagagcacatattgggttcagatgtaattatctgctttttcaatgattttaagaaattagaaccactgtttttctctggctcttttcatgacttttttcaaatgttggttttcagcagttcaactattatatacttaggtgtgatttaaaaaaatatatatcctgcatgggatttgctgatattcttatatctataaattaatgtctttcactgaatttagaacactttcatcccttcccacccccgatattgatcttgctccattctcttctctccttttgggactaaaattacatgtctgttaggctttttgatattgtcctacaggtctctgaggctctcttcaatttttcaaatttttttctgttattcagattaaataatttctattggcctctcctcaaattgtactgactcttggttcctcttcagtctgccgttaaatggatccaattgattgtttcagattttttttttaattgtagaatttccatttggctctttctttgctaagctttcttatctttttatttactaagaatacattttcctttgagtctttgagcatagttataatagctgcttaaaaaacccttgtctgctaattccagaaactgggtcatctcaggatcatggggacggtccccataactatcttttttcttaagaatggattacatttcctgtttttgttttctttttagttgtttgttatattgagctattataaattatatcacagacattgtgagtgatacttggtaaggactgattctgttttgttcctccaaagagtagtgcttttttgtttcagtaggtagttaattcagtaatctaagacttcaaattctgactccctagtattgggcagcaatataaattgctgtttagttcttttggctttaactgggctactccatacaaacttggctcaggagtcacttagtgacttagggaacatttgtacacagaatttgaactcccctttttggaaactctctttttaccaggatttcttctttcactttcacctattgtgttgccttgatctctgtcctgatgtttcagtgcagcaacaccatctgagtgttagccactcacatgttgcagaaccgggcctactctcagactaaaattgaccaaaagcaggaactcactggcttgctgaatgtccaggtcttgatcacactccagaatgtcctacttttggtcatcaggtgcctagattttttagaaatctttgttctaatttttagaaatatttgttcagagtttatagttgctatctaccagggaactgcttcaataggaactactcaaccattgccagaaccttcttgaactttctagaaacactgtcttatttattttattttattttttagacaaaatcttactctgtgctctgccacccaggctggggtgcagtggtgtaatcttggttcactgcaacctccacctcccgagttcaagtgattctcgttcctcagcctcccaggtagctgggattacaggcacctgccaccacacctggctaattgtttgtatttttagtagagacggggtttcaccacgttggccagtctggtctcaaactcctgacttcaggcgatccacccatctcagcctcccaaagtgctgggatttacaggcatgagccaccacgcttggcctagaaacactgtcttatttaaataagaaagagtgtctctcagaatggaaagaaaacagctttggagtcaaacccaacttggatgcagaatctcactctatcttgtttttttttttttttttttttttttttgagactgaatctcactctgtcacctaggctagagtgcagtggcatgatcttggctcactacaacctcggcctcctgggttcaagccattcttctgccttagcctcctgagtagctgtgattacaggtgtgtgccaccacgcctggctgattttttgtaattttagtagagacggggtttcaccgtgttagccaggatgatctcgatctcctgacctcgtgatccacccgcctcggcctcccaaagtgctgggattacaggcgtgagccaccgcactgggctggatatgttttttaagaagaaaacgtaccttactgtttccttcgtgatttcttcactagccgctgcaagtgtgtgtggctctgtgcattgtgggcagggtgaggcagctagcttgatttccattttgggaatgagtggtgcctcctcatggaagacttcttaaaacaggagatgggtgccctctgttattcttgtatggcaggcagaataacgtccccctaaatgtccacatccgaatccctagaacctgcgaatatgttgcatgtcaaaagggactttgcagatgctagtaaggctaaggaccctgaggtggacggatgattttggatcatctgggtgagcccaatataatcacatgcgtccttaggagtggaagagggaggcagagagttattcagagacagagatatggccacagaagcagagtcagagatgccttggtgttgtatttgaagatggaggaagaagccacagccaaggcctatgaagcagcctttagaagcttggaaaagcaaggaaacacattccctctcagccaccagaaagaaatgcagccctcccaacagcctgattttagctcagtgagacccatgtcagacttccagaaatgtaagatcataagtgtgtgctgttttattttttatttctttttctgttttaaaccactacgtttgtaaacatttctttggcagtaatcgttgcttttgatggaagttggagcagtggtcaagctcgtgggctttggagccagtctgccagtccgccttgtttcaaaccccttttcctttctctctttctttcttccttccttccttccttccttccttccttccttccttccttccttccttccttccttccctccttccttccctctctctctttctttctttcttctttttttttttgagatagagtctcattctgtggcccaggctggaatgcagtggtgtgatcttggctcactgcaacctccgtctccttggtttaagcgattctcattcctcggcctcccaaatagctggaattacaggcatgcaccaccacacccagctaatttttgtatttttagtagagacagggtttcaccatgttggccaggctggtcttgaattcctggcctcaagggatccaccagcctcggcatcacaaagtgctaggattacaggcgtgagccaccgcgcccagcctcaaacccttttcctgtgattttttttttttttttttaaagctgtgtgaccttgtggaagttgcttcacttctctgggcctcaaatttctcatctctaaagtcggttaacaataatctacaactcatagttttttgtgaggatgaaatgagggtttcatacatgcagaaagcctggaagtaagttttagctgtggccattctgggcaggaatccctcactaggtaacttagagcggcggatcagggcacagacttgggagacagactgtctagcttcagatttaggcttcttactagtctgaagtagaatggttgtttgttcctccactgcttcatctggaaaacaggggcaggcatcccagggtgtttgagagatcatatcagatggagaggccagagtttttagccgatacatcatagacattccccaaaggacagttattgttatcattgggtggatggggaatattgagcctccagccctaggcattgtggatcaatttgttcttcagttatctttggaataatttaaatacactggattgggaagacaaagctatcaccctcctgatgggagagtgctgggtacctagcaggtgctcagtagttagtgaatgaatgagtaagaacagaacaggtcctaggccctgccctgaagaggctcacagtgcaggacaaggcctggagtcaggccagggttttgtggttgtctttaaaaagaaacaaaacaaagaactacttcctaccagctgaccctaaacccctcagctccctgcagggacctctcagccctgcaggggagcccaggctatgtgccaggcctggccttgctgtcagctttctaagccagtcacaaacattctcctctcaactttataatggatgccccccagcctcctctcccctctcagggtgctcctgaggctatgagcagctggcagttccctgtctgagaggtccttcgtaccgcaggagaggcagctctcacctgaaggcctccctggacaccggtctcaactttgtgtgttaccagttatggagaattatttttagtgagttacactctgttagggccaaacacaaggaggaaagagtgactgaatactgctctgagtcagtgactgtgacaagactgtttttttcttcttccctgttgcaggcctgatcttttggccagaaggagattaaaaagatgcccctcaagatggctgtgcctgtcagctgcatggagcttcgttcaagtattttctgagcctgatggatttacagtgatcttcagtggtctggggaataacgctggtggaaccatgcactggaatgacacacgcccggcacatttcaggatactaaaagtggttttaagggaggctgtggctgaatgcctcatggattcttacagcttggatgtccatgggggacgaaggactgcagctggctgagagggttgagatctctgtttacttagatctctgccaacttcctttgggtctccctatggaatgtaagaccccgactcttcctggtgaagcatctgatgcacgttccatccggcgctcagctgggcttgaggtgaggctgtcctggctggtcacggagggttcactgggatgtggctggtgttctcaacgaggtggcatttaatgagcaccctctgtgtggttggcgtgatgctgggtgcctgggggagacagatggaactaaagaggtccttcctggaagccgttactgttccctgccctgacgtgtgttattgtacctgtcaccattttctgatgttcccagtttacgtatctgtcaccatctacctccctataaagtgcctctgctgttggttctgtgtccttaagacattgtgtggcatttggcacagtctctcatgctgcagaaagggtaaattaagacaggattgttaatgaatgaagacatgggagattcaatggaaagatatgcatggggggataatttcttggctctgtgctcagagctaggaacaacataaggccatatggctggtgctgtgagggttgtatgtgggcagatgcatgtggaggcagacaggcctgggtatgactctttaacacatacacactgcatgcctccaggcagactgatggattcctttccctgcagtgaagggttaagtattatcacacgtcacaggactggaattgaagatcgccaagtagacattgaaatgctgaccacatgacagacactcagcatgtggtgggtgatgttggctgggggtagcttttggggatggtggacatttcttggccctgatctttctgagcagagccagggaggcagtgctggactctgacctgggcacagctggttggcgtggacagttgattaaaggtcacagtttccctgcagcccatgggaaggcagagtgacaagtcagtggcagatgaggaaatggagtctcatgccagctggagggagggagcagctgggttggccacaaaggcctgttgcagttctgcagctgacaagtggaaggactggcctctcaggtccaggcctggtggcctgggaggctgctagctctgagcgatgagtggtgccaaggtgcctgaaggagagttgcagctcaaacagcaagtggtccagctctcagaccacttgaggccacctggcatgtggcggccaagaccacagttggggcggggccttgagtctgattttgattggattcctagttcggctcatgcctgacagcactttctcagacaggcttccctgacctcctaaggtaaataatgtccctctgggtgttacatgctgttctcacccatagctcttagatgtgttctaattgtatattcatatgtgcaatttactgggtttcctgtctttctctcacactagaaagtaatctttctgagttgaggaaatgcatttgccttgcacacaggctagacacatacatagtaggcattttatttgttgcatcacagttgccttgatcaaatatggtgactctccgtggttttctcttggtttctttgaaaaggtcagacagaagggaaacactcttttcttgagtatatatatgacttagcccagcaatcccactaggagagcaatggtttatccattatacagttgagcgcctggaggctctgaggggccatgtaccttccccaaggttatttatccaggagaagacagagccagaagctgagaactgcctcgtgttttataccaaacaaggccccttcagctgaagacttttccttgcggtcttgggaagggtgtgtgtgacggtgagctgcagcaggtgctgggctgtgcttgactgtggtcacgtaggggcaggcagaggagccatttcggggggctgctgagggtctggagagaggctcacagtggtgagcaaagaggttctgggatgggaggggatcagttgggaaagacagaggcagatactccccactcctttgtgccttcccagtcctctctcaccccttcctgccctctccccacaccctatcgtggtggcagctgtgcctcacttatcacatggtccatagctctgttttttccccttttatcagttactgcctagaacaacccaattgtggtggtctgggttatctcccactcttcacagtagggccagagtgggctcagacaccaaaggacacagaatggttatggcaatgaataagattccttctctgtgtcagcaaggatgctgatgtagtaataatctccatttattaagccatgctgtctacagggcacatagcacatgtttttccattcaaacctcaaaacagagctatgagatgcgcaccattatgatgattatctgttttactgttttttgttttgttttgtttttgttgttttttttgagactgagtcttactctatcatccaggctggagtgcagtggcgcaatctcggctcactgcaacctccacctccttggttcaagtgattcttgtgcgtcagcctcccaagtagctgggactacaggcgtgcgccaccatgcctggctaatttttgttggccaggctggtcttgaactcctgacttcaagtgatctgcctgcctcggcctcctaaagagctgcgattacaagcgtgacccaccttgcccggtctgttttactgttgaagtaactggagcacccagagggaaatcaagtgtccctagagaatacaagcagcatttggacagccctgtctgactccaaagccactgcacaacattgcctggagctgagagatgcacattctcccttcttggccactggtgactgtgaccttgggcaaactacctctgctttttgggccttagtacattcattcatagagaagctggctaatttctcttctcagcctggagacttgagagtgaaaggggcactgtatcacttactctgggatgacaggtgtatacgaggatgtagctgggcaagccaggcctagtggctcgcacactcatcagttagatggtgggtgctggtgctgctggtgcatcatgcatacaaggctggctctcccagttttccctggacttttgcctgaacagtttgcatttctactcgtggtgcaggagcttgctgttctgatttcatgtcacaagcctgctttcagccacttagaagagccctgttatccctgactgccgctacagcagtcccaacctgtgttgttttcacttgatgggctcctggaattattgacagcacactctctagtcgtacgggctgccctgccacctacactgacatcctggccaggttcctggagatggcctggcatcttggacctgttccccacggggtgcctggagcctctgatggtctacccagggtggcaatgagggaaaggctgtgacttgatcatctccaggggttcttcggtgaacagcccaaggttgcttaacagctggtgtgtatgaatacctggaatgtgccagttcaccttctaatctggcaaggagaatgtgtctcctccttatgcatatgaacaaactgaggttcagtgagatccagaaagctgccacggttactgatggagagagcagagaagctggtgtttgcagtcccatctgtcagccttgacacccctactcctgtccagccagtgttttccaaagcgtgctgatgagcaatgcaagatgatttcatgttatagataagaataaaaaaattgttttgtgtttaactcaaattagaaaaaggcaacaattggtatgtgcgacctgtggttttgcagatgatactgcttaggatgttggtacttaagaaaaggtcaacttttcaaaaatactattagtgacatgtggacctagtcctcctgaagaggactacattggggcaccggtaattgtttctatttgcggtactctggctgtgtggctctggccacgccactggaggcagtgtctgagcctgtgacttgagtagtagctctgtgtcatgtctgctgattctccccaaatcctgaagattcatgatgaagtgactggccggcttggtctgaagctagattgaaaacaataaggatcccagaacgatagcactttacaatcctataatttggctcaaattgcctgcagttactatctcagccctgcctgttatgttcattgagcacccaaagtttttcagtcaattcctgagttaattattctctgggattgaattatgaaatagtaaatatttccactatgcaatcaattggtgacttattcatgtattcatttcattcatttagtctcaataaattgaagataagggctgagcacagtggctcacacatgtaatcccagcactttgggaggccgaggtgggcagatcacctgaggtcaggagttcaagaccagcctaaccaacatagcgaaaccccatcactactaaaaatagaaaaattagctgggtgtggtggcatgcgcctgtaatcccagctactcaggaggctgaggcaggagaatcatttgaatctgggaggcggaggttgcagtgagccgagattgcaccactgcactccagcctgcgtgacaaactgagactccatctcccaaataaataaataaataaataaaagataatattacctaccccatgagtttattatgagaattaaataagagaacatattaaaaggtttcattcagtgccaggcatataatatgtactcagggaatactagttttttttaaataaaattttaaaatgggattagaaggtcaaagcatataggcataaaggtataaaaaatattgaagatgagtgagttactaaaatttaacattacgtttagctctgagcttcctaattagcacaacatgctaagtaggttatatttgtatctaaagtaaagattggcaaactttttatatcaagggttaggtgacaaatgttttcagctttgcaggccacacagctctgtactgcttgtcagttctgcctttgtatctggaaagtagccatagataatatgtaaatgagtgggtgtggctgtgtgccaataaaactttatttacaagaactggcaataggcctttaggctgtagtttgtccttggcctaaataaaggaaacatgtttgtctttcaaaggcagaaactcctcctggatcataaacattgaaaaaaaaattgttacaagatgcaatatttctgtgagacttgttaagcagtatatgcgcagtgctttcattaggattttacagaaaacttagaagatggccttcacatggctagtttccttactgttcattcagcagacatttactgagggcttactatgtcctaggctctgatatccatacatggtaaaacgtaaaggcatgtgcattttggcagggggtgctgcattgacaaggagtggtctcggtgacagttttgggaagtcagtttagaacagtattggacacactgttccatccctgaattacacacaggcctcaatgctaacttgagtgggcttttggtccagcaggcctgggctccaggggcagtcactcagcgtcctgcctcaagagtggttgtgtcatgaaatcttggccctctttgactgatagctacaattatttgaagagtgtggtttttagaacaaaactaaatctgttttgaagctctgctgttttatacctgctgtgtgatcttgctcaagtttttatttttatttttttctgtataagggattttattttatttttattatgtatgtatttattttattttaagttctggggtacatgtgcaggatgtgcaggtttgttacatggtagacgtgtgccatgtgatttgctgcatctatcaccccatcacctagatattaagcccagcatgcattagctatttttcctgatgcctttcctccccccccccgcccccgacccacaggccccaatgtgctcaagtgttttaatctctctgagcctcactttcttcatctgcaaaccataacacctctgaatctatttgttactctaatgctagctatctagtgtttgctctctaaatgttagttcctccacctgggggctgggcgggcggtggctgacctcaccccatgaagctgtctcctggctttcccagctagagcctgtgggtatgaagattgcagccccctcctcctgggggagtattcagtgtaacaagccttgagaaaacactggcctgtggaattccaaagttaatgaagggaacagattccaagagggtctctgtttgaccttccactctttccccaaccccgttacccctgagcgagtttgggggcaagcataggtttgtaggcactgcaaagaagaactctcacgctgtggtgcaggaccgtggccttggcctctggatatctgggccaggtgggtgcatttgggcctcttccctacagcgcctggtcagactgcaagagacataggaagcagccagggcaggctatcttaagaggagggagcatatttgataaagttagaaaatgattctcagctgtccataggaagagcagagtaaggggctatgtgagaagtttggaagatggcccagttccaaaaatgaagaaagaaagtaagaaagaaagagagaaagagagaaagaaaggaaggaaggaaggaaggaaggaaagaaagaggaaagaaagaaagaggaaagaaagaaggaaagaaagaaggaaggaaagaaagaaagaagagagggagaggaaggaaggaagaaaggaaagaaagaaagaaagacagacaaagaaagaaagacaggaaggaaggaagaaaggaaagaaagaaagaaaaaggaaggaaggaaagaaggaaggaggggaagaaggaagaaagaaggaaagaaagattcattattctgtcctctgaacctgagtgaagaaaaataccctgtcctttgtacctgcgtgaagagagaaaagaaaagaaaagaaaagaaagaaagaaagaaagaaaagaaagacaggaaggaagaaaggaaagaaagaaagaaagaaagaaagaaagaaaaaaagacagacaggaaggaagaaaggaaagaaagaaagaaaagggaaggaaggaaggaaagaaggaaggaaggaagaaagaaggaaagaaagaagattcattattctgtcctctgaacctgagtgaagaaatatactctgtcctttgtacctgcgtgaagaaagaaaagaaaagaaagaaaagggaaggaaggaaggaaagaaggaaggaaggaagaaagaaggaaagaaagaagattcattattctgtcctctgaacctgagtgaagaaatatactctgtcctttgtacctgcgtgaagaaagaagagaaaagaaagaaaagaaagaaagaaagaaagaaacgaaggaaggaagaaagaaagagtgtaaagaaataaaaggctgtaaagaaataaaataatgtaaagaaagaaaataatgtaaagaaagaaaagaaaggaaagaaagattcattactatcctttggacctgagtggtgttttcagttaaaatgagtggagtagaacccagagatcaggcttttgaggacggtaaagcctcaagatacattctgtttctggctcagggaaccttcagggaaaaggctttggagaccaagctaggcagggaagcgcctttgcttatcatgctggagaccagactgaggcagtgaagtcaccataattgatgggccacactagactggagccaaccatggcccattgctgagactctgggcctcagggtggccttggctggaacctgtattccagtggccctggtggctctcttccctctcaccttcccaggaggcagattatttccctgtggtgggggtgaggcggtggcgtgggggcttcttccctctctctctgtcttgtagccttgttaaaatagtggccacacgctgatagctggatttccagtgcagttgctggggatgggggtctttccctctcatctgtctgtcaccctttatcactccacaaggggtgggggtactggacagaaagagtgtgtcccacctgattactgggaagtgcaatggacacccccaccccccgttgacttatctggctccaaccgaagaacagctgttggtggtcaggtctctgagtcactcagtagcttgggactgggttcagtgggagatgatggcataaacaaataaacactggctggcccccagctctcagctttctgctcactggggggccccagaagcttcctgttgcgtctgcagggaaaataaggatacccataatgaaaatagttttcctgatggagaaatgctctggggaggttgttgaggcatgttagaaaatccctgaggctttctggctctgtgagctaagggaggacacttggcctctctgggctttcgcttgctcctttgggaagcctgttattgtgaaagtgagatgatctgggaggtaaaactggccagttgtccatctcccctctctgaacatgatgcatagtaagccctgaatctcatttaaatttggaagtcagactgactttgtgactgtcctagtttccggctgttgagtcagctcaggcagttcttgggacttctgtgagtctctggctccccgtctctcaatggggtgacagtcctcgtcttgtgcccctcacgcgcttgttgagatgacagatgagtcacctctgggaaactgcctgagagctggatgacaccactctgtgggattgcatttcatccacagagacatctggaaaaggaggcagagcagagcctgacttttgattatttggggagggagcctggagctggtggaagtgagggcatagagcacattcctttcaggccaggcagtgcttggctgctgaggcaccggtggagacctcatgatctggtggtccgcctccctcttgtgctgtgtgtgcctggagctctctggcttccttggctttccactgtctttcccaaagcctccatgtattctagaatctgctatggagtttcagggggatctctgtatagtgtgaatatctagctctgaaacacaaaagagaaagctacaaagggcaacgtaacaaaagccgtattcccacccaaggattagcacatgctcatgaggtggcatgctttgctttggatcattgtctttattttattttattttgtttatttatttatttattatttattttttgagatgcagtctcgctctgttgcccaggctggaatgcagtggtgcaatctcagctcactgcagcctctgcctcccaggttcaagcgattctcctgcctcagcctcctgagtagctgggactgcaggcgcgtaccaccacacctggctaattttttatatatttagtagagatggggtttcactgtgttagccaggatggtcttgatcttctgacctcatgatccccccacctcggcctcccaaagtgctgggattacaggcatgagccaccacacccagcctggatcattgtctttaaagaaatttaaaaaaaaaaatagataaatgggaagtctatgagccttgtctcccattccccatccttctcttcatacaagtacctctcctgaacttggggtataacaggtcatgctcttacaatttcattacaaatctatttgaagatcactggtagcaccattttgtgtgtttttaaattcttaggtaggtgacataacgtataagatgtctgcactttcctcttttctcccggcgctatgctgggcagatgatgctactatgcttgttcattcattccctgggccacagagtcttgggttgtttccagaattttgcttttgtaaacaatgctgtcatgagcatcctagcacagggctgcaggtgcatgtctgggtgtgtcccaggagtacagggcacagagcatgcacatttgcagcctgactggaggttgccacatcactctccagttggcactatttcctaggttccttccctgagagcctgggaacttctggaaggcaggagtgggtggtgttcaccactatatacctctgccagtcagcatgccccacaccatgtaccagctcatgacacgcctgaatggggtgaattctggaaggggacaaggcaagtgccagggcaggtccagagtctgggtgtggaaggagcaacataatgggggccccttgcagaagcagcagaaagaacaaagaaataggggcctggagtgggggtgtgaatgaagacattgctgttgagaagatacttgtgaagaagccaacagcgttgtctgggcctggctggatatcatgaggctggacatggaggtcccaggcaccattgctgtgggcttttggggagttggatgcacagtggagagctgaggaggaagttgggcttgctgcagagggctgctggaggggctggctggagtctggctctggccctcactcactgagggttatccaagtgacccattgcaggaagaggggtgggggacccagagttactgtaaccactttatgagtctgtctcagccaggatctggggcttctagcaaagcccacagcacaggcacattttaggaaaggcaagattgagatgccctcggtggcccagaaggacacttcagggcagcagggctgtaaaggtcaggagggggaaacttctggaaggaagttgaatgttgtgggaaaaagctgacataaatgaacaaggaatgatttttttcttttcttttttttatttttctttttagagagacagtcttgatatgttgcctaggctggtctcaaacttttgaacttgagtgatcctcccaccttggcctcccaaagtgctggaattataggcatgaaccaccattgtacagccacaagggaagattaaacatagacagtttgagaagagtttttttttttttaaatttctaattttatatttaatagagatggagtctcactatgttgctcaggctagtcttaaagtcctgagctcaagcgatcctcctgccttgttctcccaaagtgctgggattacaggcttgagccactgcacctggccaagggtacttttttttttttttaagaaaaatatcgttagaaatagaaaatttggatttggtaatggatagtgcatactatgaaataacctttttacttcttcaacacttcccatgataataacactaatacaagatctttggtgaaaacttagaatgcgtagaaatgtgttggtggttgaaagagagccccataaccctccactgaggagtaacctctgtttgaccttagaaataatacctgtgaacagaatggccaacttgtcctggtttgccagagactttcctggttttggcacggaaagtccaacactctgggaacctcctcagtcctgtgcaaactgggatggtcgttcaccctacctgtgaattgaatgataccactgagcatcaagcactttgacagttcacaagtcatttctagtgctgtcattgtgtatacttggttccggctgtgtgcaaggcattgtgcgaggctgcatgttctggagctacaccagagctccagagctgaagttctattttctttttttttttttttcactttttattttagaatcaagagatgcatatgcaggtttgttacagaggtatatgggatgcggttgaagtttggagtatgattgaactcatcacgcaggtactgagcatagtatccagtagtttttcaatccttgtccccctcttttcctcccctttctagtagccctcagcatctattgttcccatctttatgcccatgtgtacccaatgtttagttcccacttataagtgagaacatgcggtattttgttttctgtttcagcattagtttgcttatgataatggcctccagctgcatccatgttgctgcagagagcgtgattccattcttttatatggttgcatagtatttcttggtgtatatgtgccacattttctttatccagtccaccactgacgggcatttatgttgattccatgtctttgctattgtgaatagtgctgccatgaacacatgggtgcgtgtgtacttttggtagaacaatttattttcctttgagtatacacccaggtatgagattggtgggttaaatggtagttcaacttggagttttctgagaaatctctaaactgctcctcacagtggctggactaatttacattcccaccaacagtgtgtcagtgtctccttttctacacaggcccaccaacatctgttattttttgactttttaatgaaaaccattctgattggcatgaaatgtatctcattgtggttttgatttgaatttttccaatgactagtgatgttgtgcattttttcatgtttggtggctgcatgaatgtcttcttttgagcagtgtccgtccttgtgctttgcccactttttaatgggattatttgcttctttgctttttgatttaagttccttatcgattctggatattggaactttgtcaaatgcatactttgtgaatattttctcccattctgtagcttgtctgtgtactcccttgatagtttcttttgctctgcagaaactctttagtttaattaggccccaattgtcaatttttgtttttgttgcagttgtttttgaggacttagccataaattcctgtcaaggcctatattgagaggggtatttcctcggttttcttctaggatttttatagtttgaagtcttaagtctttaatccatgttgagttattttttgtgtggtgataaatagggattctgtttcattttcttctgcatatggatagccatttatcccagcaccatttattgaataggaagtcttttccccattgcctctttttgtcaagtttgttgaagatcagatggttgtagataagtggctttatttctggattctctattctgttccgttggtctgtgtatttgtttttgcaccagtaccatgctgtttgggttactgtagccttgtagtataatttgaagtcaggtaatgtgaggtctctagctttgttcttatttcttagaattgctttggtcattcaggctcttttttggttccatgtgaattttagaatagttttttctacttctgtgaaaaatgatgttgatagtttgaaagaaataacattgaatctataaattgctttggacagtatggccattttaatgattttgattcttccaatcaatgagcatgaaatgtttttccatttatttgtgtcatgtctgatttctttcaacaatgttttgtagtccttgtagagatctttcacctccttggttagaaagtattactagatattttatttatgtgtgtatgaagccctgttttctatccttaaggagcttacaacttgtctttggtatgcagtaggggcatttcacttgtgagagtgggggtcttactgtagcctgggcaataccctcttttattattgggtactaaggatttaaggatatttttgttctggtgggttatccagttttgcaggttggtaccaatgctgaatttgactgcccctggccctgctgtgcagcactttcagacccctaaatgatgtgacccattctggggccagctcagtgttttacagtgatgaagatgatgttgatgatgatgatgatgatgtcaacatccatcattctgaggtgtgtgtctatctctggcctcgttatacctgcagaacattcatgtggtagccaatacctgggaaaataatcccacttgccaggcagcaaaccgtggccctccgttagggggatggcatctcacactcatgaagtgttgagtgtatgggtccctggccagctttggcaactgtgaggcaggcattatgcttccattttaccactgacagactgaggccggtgatggggagcacctgggcctgttggcttgtctgtggtaggccaggctggctacataatatgtggggctcagtgcaaaatgaaatatgggctctcttgtgtaaaaattaggaagaatttctagatgctgacagcagagctttaaaccaagctcgggcccctctgagccaggagccctgtgtgcctgcacaggctgtatgtccaaggagctggtcctagggcaggactaaggttcaggcttcgtattgacttccatgaccaagcatcctgggtccaggctgtgttttgtgtgtctgcagagctctggtctatctgctgataagtccctgtggtgctcaaaggtacctggcttccttggagaaaagtttctctctcccctgcccttccccagcctcaaaatacacaaatgctcagatgaatacttaagaatccaactggaccagcttctgtctgtgacttgatgacttaatgtgattttgggggatgcaacattgggggtgatgctttagcatgccttctctctcccactcaggaacatgggcaaatgccatgggctgggagctctcacctgctcttttgtgctgagcttcactatctcttctgggcacagattggttacagggatatagaccacctgtgtggtgccctgggggttatgtccacggggagcctcacatgaagaagagaatttcctttgggatgtgtatttcttgtggtcttagcatgctggcaattcttatttttggcatcatttaatccttacaacaactttgtaaggttttcacatccattggtcatttctgagttgagcacctcaactcaggtgaatgtgtttgtatgaatgtttgttgagcacctactatgtgcagggcagtgtagtaaaaaattgaggacctgtgggtttttttttgagtatatataattgtgttcttctgtcattttacatgactttcacctcatttcattgctgtagcaacactgtgaggttgttgctgtcacccccatttctcaggcgaggaaatagaggttgagtcaatctcccatcttggatttacctgacatcacagtctgagtcttttgtggcatgtgcaagagtgcactggctttcggggcctgagctggctggcctggattgaatcctggctttgccatttgcagctgtggtctgaggcaagttatttaacttctcttgacctcggtttccccatctgtaaaatggggctatactagttgctctgtgtaggaagggtctgaggtttcagtaagatacattttgcacaaaccccacacacaccaagtatccatgaagcctggttatccttataacctcagagcggtttggagagggttaggaacttgcagatggtcacataatcggtgtatggcagatcttgggcagagctggactggtcttcctaatgagagctcctttccccactctgctttcatggacagaccctaatgaccacctgggttatgtttttgtccctgtcaattcctttgtccttgctgataacctaagggaaccttgagagccagaacgagacaggaagaaaatgcctggctgctgcttgcggggttaattaaaccattcctggggtttcatttgctctctagttagcaccaaaataaatcctccaaatggctttgagccttccagttgacattgcattttgaattctgacagcaccagcattttacatcttcctgaggatgataaatgtttagatagcaccgaagataatggtaaaaggagaaactgggggtagttcaggctgtggctgagcagattgtaactctttggtgtgacgaatgggtgagaagttgcttaaaggacacatctgatgtcccctgctcctaggggttgagagggggatggggggtggactctgttttgccatccggagaatccattgccttcccgatgcttctggggtctcatgcttgagtcttgtttccatgcgttctgtcagatgttaaggtcttgtgcataatggttgaggtgtcaatgtgcaggcgttaatgtcaccattcttatgtaattgttaccctttattgagtgcctactatgtgccaggatttaaatatttctctcagcaacccaaagatgtaaatgtcatatcaccttcattttacagatgtgaaaacaggctcggagaggctgagacacccagccattaaggactcagctgggattcccagccttccctggcactctctcttttttttttttttttttctgttttgagacagagtcttgctctgtcagccaggctggagtgcagtggcacaatatcagctcacttcaacctccctctcccgggctcaagcaattctcctgtctcagcctcccgagtagctggatttgcaggcatgtgccaccgcacccggctaatttttatttttaattttttttggtagagacggggtttcaccatgttggccaggctagtcttgaactcctgacctcaggtaatctgccagcctcggcctcccaaagtgctgggattacaggtgtgagccaccatgcccggccttccctggcactcttgagcatgtttccagaccgcctgcttcctaccccagacatgtcaaaatgcggtgctgtaaatgacagggctctggtcccagatggacagcccgggccctttgaagacactctggccttcaggagtctggatctttatgcctgatggaactgacacgggcctgctatgtttacagtgcctgttctcctgcagggtctccggaagtcatcagccgtgctggccagcactccggaggatgacaggaaattctgctgcagctctgtgggctggctggggtgcatgctggacagggagcgggcggacagggctggtagggaggaaaacaccactgaaatagttcagaccgtattgtcagtgaattcctggattagtatgcagtgctgccaatgatcagatttgggtcaggaagcccagatggcagaaagattgtgttaaatctttatatttttccacgaaatcctcaccgtttcagaccctgttttctaagctatcaccctaataattgtggattttggatttccaaggcacgttttatagtggttgtaaggaggggatggttgggttggggattgggatgggaggggggtagctgaagaaataagaaagtgctgcagaaaggagcacattccacacccagcttcttcctgattgtgtttccctccaagcagcgaacaagaggctgattcaagtggctcagtggcctccctgcctggagttgggttcctatgccttccagtgactaaggaggaaattccatttcagttaatctgtggccgcgcatcacccatggcattctctatcttaattttatggctgcctcatctttttggaattcgccttctttttgtgtgttgggtgataagtcaaggagacatatggcacagctccacaaaatacaaccacattttagtattccgtacacagtcctttctgggcatcccaggctttgtattttcacgttggtcggccgtgaggagggtggatcttcattatctgtgcatgcatgtgcatcccttcatcccttcctcttcagtttcttttctttttttttcttttttctttctttctttttttttttgagatggaatcttgctctgtcacccaggctggagtacagtggcgtgatattgactcgctgcaacctccgcctcctgggttcaagcgattctcctgcctcagcctcctgagtagctgggattacagggttgtgccaccacgcccggctaatttttgtatttttagtaaagacggggtttcaccatattgaccaggctggtctcaaactcctgaccttgtgatccgcccacctcagcctcccaaagtgttgggattacaggcgtgagccaccacatccagcctcctgttcagtttcttaacccttgatgggactcccggctaaacacccccattgtctgggaccttgagattagatgcagtagcactgctggtttcatggtggactttgagtcggatggaggaactccttggagtgcgggaggaagggctgcggaaggtgtctgaactatcgtagcagtagggtccctgccacagggaggtgaggcagccatcatcaccagtcctaagaggtacggtcaccctccgcctctgtctccctctccagtccccatccaatttcagctttgaacccagctgccgggtcttcaaagcctgttctgacttacccagcagagttggttgctctgtcctcttagcttatagacgctgcccgttttttccccacgtggcccctgccatttaggtccatgtctctcgtgatcctgtgtgtatttccagtggaaggacaaggtttggcccactgtatatttgaaggccctcaatatggcgttagttcgtatttactgatggatgaagaactctgaggagatctggttgaaagagacttttaaaaattaaagggaaatgggtcacgcaggccgcgtttttgtccttgcctattggctacttttgctattcagatcatctgtgaatgtaagtgactgtctgctgtgttcgcagtgtggttactgggaaaacagagctctctctccccaaatcaggtgaaactacaggaaaacagtaggcaagagtcttcaaagtgatgcatctcgagagagagagggcctgggtctgaatcatggctttgtgccttaccagcctgtgattctagtcactttaccttctgagccttgtttttcccagctgcaaaatgagtgtgataatagcgcttgcttcaggggattgtttcaaggatcagttgaaatagtgcacaccgaatgtttggcatatgtgcggagctctttgggggtgactcatgggcaactgtttttcatttaagaactgagtggattggacctttaagaactgctttggtcccactgtcatgggaggttagtgctgtctggagcaggcatggggatgtggtggtacagggtagggtgtaggggtccccagaattgggggcctccgtgttggaaagggacagtgggcagagtccatgcaggcgctctggggctgacagggacctgggacttctttctgagaggcagtgaccagccaactggagtggagggttgtggggaaaatgtttggccaaaggatttaggaaccagagagaagcaggcacatgatgctccttttcttggtggggtgttcatcaggcctgtagctgccacagtcatcactgtggctgagattcatacctgtagcaccagagtgggaggcaatttttccaacatggggcagaggctgggtgtgtggggattggttgcaaggtgctgggagtggggtgcagggaagggcctctgcacaccacgtccgtcctcatcctgctatgaggtcagctctgtacatgtgctggaagagcaattagcggggtgcctaagcagtgtccatcatggacgtgggtctctgctggccacgcaaggggaagatgggactggtgggaagattggggagatggaagcgggggcagttgtgtgcgaaaggtacagggtcgtggaaacatgcacaagaaagtgacattttagaaggtggtttttgttccataataaatttattagctttggaatctgactctattgccttggcttctccaaactttggtgtcctcatctgcaaactggggatcacaatctcagttttgcagggaatgtgaaatcctgacctgaaatgatcacatgtgtaggaagctgacaaagaatgctaattttcttccttcttttctttatggcctttccttggtaaatctctgtgtgattgataactcatgaagaacctaccagtcaaatcagttaaattaaatgacttcctaatgataataattagattagtaactaataatcatagctgacatttatctagtgcttattaacttctgggcagtgcgaatttggtctcatctgttaaataatttaattcctgtaataatcctaggaggatggtgctataattagccccattttacaaacaagaaaactggaggatcagagaggctaagtataatgtctaatgtcacactgctgaaagtggcttgctggtgttccagccccaacagtctggctccagagtttgtgctattaaccattatatcagtctgctgtgtgtgtgtgtgtttgtgtgtgtgtgtgtgtgtgagagagagagagagagagattgtgcattgtacggtgaagagcaatagaaatcattataaggcattcctgtgctacagtcttggtgggtcaggcttacttatagaagctgtgagaaggatggggctatgggctttaactcagttctgacaatctgtcactcccagaacctgaggcaggctggacctatagacttccacctcctcttcctcctgccctgaaccgtccagggactcagaggaggtcagacaggtgggactcccagaatagtgacctcctctgccacttgcagcctatgtcgggctcctcttatagagccacccccttgcttatgctgtagtgttcctttgttctggccatagttttcctgggcctgtgtcagttgagtgcgtccagatgcagctgggttgagactcaaagccctgaagataccgcaaggggagtgctcctgtgtgcagttgctctgacctgcacagcaggtcggagtggccgccggtccccggctgccagctgtttacctggccggccttgcaaaggctcttcagggccaggccccagccggtgaatcactgaaactgatccccgtggccactgtgaagtacgggactggaggtctccggaggagatggcagctctaataaaaacaggctgccaaaccgcagaaactgtataagcctctgtttctcatcctcgctaccacccctgcgtagtccctgttttacagttgaggaaaccgtggcccagggaaggtcgggaacttgtccaaaggcacagtcatagaactagggcttacaccagctgtgtctaatagcatgcgtgccccctctgctgtgcttttatttgcttcttggagtgctgtttagagaaattgatggttcttttgttgtgactaggggtccgcactatgggtgacctccctgctccctttggcctcaggcccttatcttaggcgatggccaaaagaacagctttacattcagtaaactgttttaactgaacctcaccacaggtttacgggtggtgctcgtttcataatggataaagaatgggtgtggctcagtgtggggaagttggtggatggggagagggcagcagagtaaccagcttttagtggagacctggatttgagtgccctgagttaggtgagcctttgtacctgtttcttcacttcttggagcagaacattagtttctccagatcccacatgtgataaagttctgtgatcctgcagtttgaacatcctggcattcagctcagcccactgtgcagaaatctatactaaacatgtagacagtttaggaagagggattgtttattgtgttgaatgttatagaataatagctacttaaattttggagcacttgccattcatcttccaagtgatttctacgtgttgactcatgtaacacaggcaaccaccctataataagtactatgtttacacacccactctacagatgaggaaactgaggctcagaggaattaagtaatctgccaaagatcccttggcaagtaagtggctaaggggggattggaacccagggagagagcataatcctaggaggagattctgccaaggtacagccctccacgatggaagggcagcagcctcctgtgagctgactcacttgagttattccacaccatcccagtggagaagttggattatccctattgtgatagaggaagaaaggtgaaggaatttgccagaaattataaatggtgacattcgcattgaacacatgtccactgaccccaaatactgggtcattttatatctttccctcccttcttttttttttttttagactagtctcactctgtcacccaggctggagtgccatggcacgatcttggctcactgcaacctccacctcccgggttcaagcaattcttctgcctcagccttccaagtagctgggattacagacacctgccaccaggccagacgaattttttggatttttagtagaaatggggtttcaccatgttggccaggctggtcttgaactcctgacctcaggtaatccacctgccttcacctcccaaagtgttgggattacaggcgtgagccacgcccacccacccccttcacaccccaccttgtttttttctttttagtagagatggggttttaccgtgttggccaggctggtcttgaactcctgatctcaagtgatccgcttgcctcggcctcccaaagtgctgggattactggtgtgagccaccacgcttggcctcttccctcccttcttgctaactttgaagctcagctccttgtccaagagcctttctgtccaggtgttttcatggtgcctgtgccttctgctggtttggagtgagcggtttccacagcatcctcccatcagccatgcattcctcagggtcaggcgcaacatgctcttcatatctgctccctggcacttggccttcaaaccaggaattcactgcacctagcctgatccattgacctgggcccagtataggccctcccatgttgggaggccatggggtgttaaggttaatgctgggccacacatgactgtgatgagtccctttctctctgctgaagaacgtgtttccatgggggacaggggcagttaagcctgggttctgttgggcgctgctgcttgggtgggtccagtctgccccatgtggggtctgcattctatgccaagtgttggcaggttctgccaggtagagctcttcagtatggaagcacttccctgtgctcagcctctccccgactgtgcacatttccttctcttctgctggggaaatggaaaacagctgaccactgattccttgaaatcacctactcagacactccagggtctgtgtgggattaagtcgtccgcagtctttccctcccttaatctcttctaaccttcctcgaaagtgccgtttcccaccccattttaatcatgccctttgctctcgcctggacatctccaggggctccagtgcctctctaagtgaagggtttggggccacacacatggctgtctgttctctccaggcccacatgcagaatccagcagccccctggcctcacacctgcttttcagtagtggctgggactgccagatgaataggcttgaggcagcatacgagtttgctatacacttgctcaaaacattagtggactcaaaaccaaaaagacaacccagtttcagaatgggcagaagacttgaacacacatttctccagagaagttatataaatggccaataaacacatgaaaagatgctcagtagccatggttgttagggagatgcaaattaaaaccatgagataccccttcatacctactaggatggctgtaattaaacaccaccaccaccaacagcaaaaaaaaaaaaaaaaaaaaaaaaaaaaaaaaaaaaaaaaggcagaaaatagcaagtgttggtgaggatgtagagaaattggaacccttgtacattgctggtaggaatgtaagatgatacagtctctgtggaagacagtttggtggttcctcaaaaagtcaagtatagaattacatatgacccagcaattccactcctaggtgtatatccaagagagttgaaggcgtatgtccacaaaaagcttttacaggcatgtgcactactcacaacagccagaaggtgggaacaacccagatgtccaatgtctgtccgcggaagaatagcaaacagtattcaactgtaaaatggaatgagacattgatacatgttacaacatggatgaacctcaaaaatgctgttctaggtgacagaagctaggcacaaaaagtcacatattgtctgattccatttttatgaattttcaagaataagcaaaattatatagacagaaagcagattaatggttgctgggggccatggggagtagctgcttaatgggtacaaagttgttgttggtttttttttttttttttttgagaccgagtttccctcttgtttcccaggctggagtgctggagtgcagtggtgcaatctcagctcactgcaacctccacctcctgtgttcaagtgattctcctgcctcagcctcctgagcggttagggttacagtcatgtgccatcacacccggctaattttgtatttttggtagagatggggtttcaccatgttggccaggctggtctcaaactcctgacttcaggtgatccacccacctcggcctcccaaagtgttgggattacaggtgtgagccaccacacctggccaatgagtacaaagttttatttgagggtgatgaaaatgttttggaaccagatagacatggtgattataccacattgtgaatgtactagacaaacgtcactgattttgtacactttaaaatggttaatattactttatgcagattttacctccattaaaacagttatgacatcacagatcccatcaggttaaaagaggacatgtgggccaggctcagtggctcacacctgtaatcccagcactttgggaggccgaggcgggcggcagatcacctgaagtcgggagtttgagaccagcctgaccaacatggagaaatcctttccctactaaaaatacgaaattagccaggcgtggtggcacgtgcctgtaatcccagctacttgggaggctgaggcaggagaattgcttgaatctgggaggcagaggttgtggtgagccgagattgcatcattgcatttcagcctgggcaacaagagcgaaactccatctcaaaaaaaaaaaaaaaaaaaaaaagaggatatgtggacactatgtctggcacttaaactggtggattctatagagatgggatgggttcattagccccattctacagatgagaaagtagaggctccattagagcacacagtgtagaagtggaaccaggattggtctgactctagaatgctgcttttgatcacttttctatgttcctcttcctctacagtggacaggttttgttttgtttcgctttgcttcagattcttggctcatgccaagtgctgtgtgccatgggtacatcacctgaccctgaagagcccagatctatgtcttttcatgcaaccttgccctgtgctttccacatattcacatccttcacagtcaatcccaccctggccactaggccaatagggactccccacatcccacttacaggggggcaaatatttatagccaaaagaaaacagaagatgtgggtttgagtcacagttccactatgtggtcatggatgagtgccttcaaccctcagtacctcagtttccctaaatgtgcagtgggagagcatgagaacacttatctgatgtcttccctggggttttgtgaggattaaacacaccatgtaggggcaagtgctttgagaatggaaaagcactgtgcagacatgagtgatgtgcatgatggttattgttagatgttctctcctggaatcaagttcaagcttcttgcatactcagcagagaacagacccaaactcccgaatctagtgctgtggcatgtggttggtgctcaataatgatttgttgtgtgaacaagtgcatgaatgagtagtaggtcaatgacctcaatgtgggcctggtcaggatttagatttcttgtctttgtgtgtgctcagcccaggactgaatgcacagcaggctgtcaggaagtagtcatggattgatgtgtccgtattcgccataaccaagcaggagatagatgatttcgttctggtctctggattttggctgcattttctctcatagtaggaattattcccggaagatccaaatgctcagctttgtcctcctctcatcctggtgaggcgtgtgatccaggtgagaagcagggagaactggccttcctggtgggaagttgtgggccatcaccttaagcttggcttgtagtggtgggagacctgtgttccttccttcctgagccccacttcctcttgattttattgtatttttagcagcactgagctgaagctttctgggttgcatgttagaggcagcacttcttgcacaagctaggggagcgtgagtatcgtttcggttctgatagcaggatggattgttatgtatcctttctgatggaggctaccaaaagctttagatgttaggatggattatctcaccttgcacaagacagtgagtgctagagtttaagttttctcctctgcaaaataaggagtggcagtgagacttagagcatctctcaagcccactttggcccaaaagttccatgactgtggcagtctagagtaaatgtgtttgatagcccctagttacaactctcttctgtctcttcccctttctgcctgcgctaccatctaatccatccacgcaaccacccatccacccacccacatttcctagccagctctctggaccaggccttgtgttaagtcctgaagacacagaaaaggctaaaacagcccctggtcttaaggactcacagatcatgaggaggcgatagatactggaatagaaggcaaaagtcaaatgtcatgagtgctgggattcagaaaggtgcaggctgctctggtagcaataaaggaaaccagctctcccttgagatccctttcatgagggttatagcctggatcctgtgatgacccaggacagactggtcttgatccaggggaaccatatcagtgacctcaagaggccccttttagccacagtaatctatgatgtggagttctcaattgctggctttgctggagaaagagagaaggaagaaatagaggggccggtcagccctcctgtacatttagtttgcggtctcaaacctctgtttcctggagctgcaggctgtatgtgtgggaggtgcacagcagtggcttggccgccccaacgcgcctacagcccgctctggggacagccgtcttttggcagagtctgcctctgcagtggtggcagctggcccaggcagacctcctctctgtccggttagtcagcgtctggtggccaagggcagagtggagcctgtgtttccgacaggccagctgcccctcagagtgaggcagcgccgtgattctgagggtgatgctggcgttcgcccctcaaccctgtcccccacaaggagattacggacaaggcagcatttctaataagcagcctctgcttgccccgtagcagatgaaagactgcgtgtaagagtgggtaattttgggttttcctgatgaaagtagttgacatttgtgctgagacctcatgcgctctgcagcgctgcctttcatctctgctctcaaagccctgctcatctctgccatgactcgggggcggcctgcgccaccggaattcagttgggccagtggtgaaatatagaggaaatggtggaatgacccctgaaggcagtggatgggggagtggagacaagtcctgactttcctggtggaggggatgttcctgggggtgtggaactgtgtatcggcccatgcagcacagccagggaaagagtgtggatcttggagcttggtatggctggctagattggaaaggcagctcctccacggacttgctcggtgaatggagggcatcctttctcttccctgatctgtgtcctcatttgtcagtgggaataatagaataacattactaccaacgacgatggctttcacaactggaaccactaggccctcaggaatgtttactggcttctagtctcattgataaactgaagccattgtgccatagctctagagaactggcactaggggcttgcatgattcatctgagttccccagacaatgctggcacatagtaggccctccataaagtaagaagggacactttgctcctgacatccatacagctcctctagctttgcagagaaagccctagagagaaagaatgtgaaggaacaaagggtcaggttaggttgtgcaacctttctgatatgcatttgtaatgcagtgagcaaatgcacaagccttgagtcgctgcattcttttctaaccacccaagagataagttgaacccccactcgtagcaacctggccacttgtctgtttagtcagccctggaatacctccactgacggggcactcactaccactgaaagatggtgtgcagaattctaatgttcttcctctcgcggggtcgtgggggctttcttccagttctctgggttctgatcgttggggctgtcctgacacccttcttcagatgaccgctgtcaggttggtgaaggcagtgcgcgttgggccttccctccctagagatgtgattgcacgtcgggtaccaggagcctggccagccctcagcttctgctaaccagggagcagtgaagcccggtttacttttgttggcttgtttattttctaatgtcacctgcctctgcactttaagtagtatttgggctgttatggagtgtgcacattctaacacagcaccttgtcagctggctgagaagctgaaaattctcggcattcctccttgatgtcaattacttcaaggagcaggaaggtgacttcttttaacaagtggaaaggattcaggtaacaaagccatttcctcttcttaaccctctactgtggaaagttattgacttagcgacacagtctgtttatctgggcttcaggagcagggctttggagactgaaggcttctccccacttttgtgcaatgttatatattttttctcactcttcatccagtctgagtggggtctgccccctcccctgagcagtcaccatcctgctacccactccggctctattggcgactgtggcatagggtggtggaaaggacgctggactgagagcccagagatcagatgtctgaccttccctctgcctggaagagctgcctggcctctgatcagggtccctaccttcgttttctggcctcactcactgtggcccaccatccagcagtgcaggtgtcctggggactcggggaaggtcagaagtggaaggaaagcctccaagccctcgcatgcaggcccaccattccactgtcaggttttcttccctttccttctgctctacattttgtgccagcagtttgggggtctcctgaatcttatcccttcgcagcggtaggcaggtgcaatttctggccagtcactgaacatgaagaagcatctataggcggagttaaatccaaaacacttggcctgacacacctggccttgaagtctcccccagcctctcctcttgtccccaacagtggttcatgttctagccacacagaaattgagggggtcctgtgttatctgtgttcctgcagacagagcttgcctaggacagcaaaagtcatcctaacataaaaatatgcatgaataaactcactgccaacattcagcccacccacatccaatgataatcagtcatttactgatggccagacgttgtaaacatctgtcagtccactgcaagaacagcagaaactcgtagctgacctccatttggcctactcactgaattaagtgatgttactcattcgctttgtaaaagcaaactgagtgaggccccaggctcattgaagactctgtgggttacccagaagcccaactttccagattcaatattttttctatttcttagctgtgttaccttgggcaagttaattaacctctctgtgcctgcatgttgcatctgtaaatgagactaatactagtacccaccttctaaagtgattatgagcattaaatgaattagtacgtttaaaggcttagaacagtgttttatgatacgataaacactcaataaatgttagctattgatattggtgtgcccagaaggcttgttactactagttgatttatgtgcttgccaaaagttgttgtgttggtaattaagtacgacataaactaatgaaaattgagtttataaagagttgttttatgaaaagtttagtactttggatagaatggataatattgatttgctaaaaaaaaattgtcaccaaataacttaaaggcaaaacagctgtaaaaaattgtaaaaccatagtttgtattccatatgctttacaggtgattaactttggcactgctttaaagaaactgaaaccaggaattgtagatgttgacttgtgagtgtgtattttgcatggaagatgatttgcatctctagtcagcgtgccaaaaaaagatcctaccctttgattggttaataaatatgcaactataataaaatatttaagtgttggtccttaatgattgcctacattttcaatgaaatgacagtggcagaactgaggaacaggggtttttctctccaaggcagatcagctgccagaaattgcacgttttgtaccagctgcagggtttcctggaatcagcaaaggcctgtgagaggctgcatgaaccacacacgcttactgacacctcctgtgtgccgagcgctgagtagtgctgaggatatagcaattggggagcactagcagaatcagggttgttaaccgtggagaagagaaaggaaagatgatgtctctctatgcaaatcaagggaaagtgatttaaaaatgttaaaaaaaaaaagttaagagaggtcttcgaaaggtgttttgcaaaatgattccttggattaatgatgaaggagtggagtgaaggaagtttatattttgtgagaaaacgtgtgctaaggaaggcctcgacattagattcattctgtacacaactcagcaaattagatcatagtttaaaatgataatttcaggggccgggcacagtggctcctgcctgtaatcccaacactttgggaggccgaggagggaggatcatttgaggccaggagtttgagaccagtctggccaacatatcgaaaccccatctctattaaaaaatacagaaaattagctgggctttgtggtgcatgcctatcttcctgtctacttgggaggctgtgcatgagaatcacttgaactcaggaggcagaggttgcagtgagccaacatcacgtcactgcactccagcctgggtgagactgcgagactctgtctggaaaataaataaatttaaaaaaattataatttttggttcatgttttttttttttttttttttttttgaggcagagtcttgctctatcatctaggctggagtgcagtggcgtgatcttagctcactgcaacctctgcctcctgggttcaagcaatttacctgcctctgcctcccgagtagctaggactacaagcatgtgccaccacgcccggttaatttttgtatttttagtagagacggtgtttcaccatattggtcagactggtcttgaactcttgacctcgtgatctgcccgccttggcctcccaaaatgcagggattacaggtgtgagccactgcacctggccagttcaggtttcaaagtataagatcaatcttattttatgtatagtttatgtgtaattataaattgtatactaataaagtcatttttataattctttatttctttttccaagatacccacccccccccccaccaaggagggctaggacaagtgacaaaagtcaccccagatcacagccaaatgggtagagctaggaatccgaagtaggtgatgaagcttgatttttcaagatgctgcaacccctctcccccatatgctacattaaatatctggacctattttaagtgggttcttttctggggtaatgaggttctcttctgcctcagttttccatggctgcagagctcctgctgttccttctgcctagttcactcttctttgccttgactgcacctctctgagctaccttcctacctccatccttgcattcattaggggtttctttatgtgtccagctcactgtgggacccaggactccttgaagagggagatcttgctcatccatctgtgtcccccactctactgccaacacagtggtaggaagggaaggcggcaggcttaggcgaggtcctgcaggctggacaggatctgtcaccattacttagcccaggcccatctctttacttccagaccaactggtgtcaccataatgccttctggcaatttgaagattctggcaacctcttaccggatgcagctggcaggataatccctgtgcattagccactttcagaggtatctgggcccccaaaagagtcacgggagtcccagacatgaaggagcattagtggccatctccccaccttgctgtatcagcaaaactgctaagccctgacccatattttgggcagtgctcaccctatctcattttatcttactgtatatctcgtttgtatcattttattaggtatcttattttatctcattatatggtaatctcatttgctgggtagaccagtgaggagggctgggacaagtgactggaattgcccaaggtcacagacaagtgaggtttagagttaggactccgaagcaggtggcggagtcaccgttgagttcatcatagcgatgctggctgcctcaaagtactgttttagttaatgctcacaagcaactctgcgaagcagacgggccattcatttgtgcttcacagtgtgggaaactgagtcagagcaggttcatgtcacacagctgataaatgacaaagccagatgtgaagcctgtgagttggattccaacattcatctttgatgaagcgttcaggttggggcctggtgtgggacatgctcagaggaggacgaggaggatgatttgggggaggcctcagaaggcgttcctggtctgagtgtgctgctgtcactgccttggtttgggtccccgcttctgagcaggatcttctattggcagagggttcaatgcagtgggtgccatgaaggaagatgtctccccaacagcatcacagtctcagggactgttcacatcacattaaaagcgctgagactctggcttttggtgaaaacggctattttgtcttgttccacgggagctgggaagaggagactaaacacaggagcctccccctaacccaggggcacatggagaaggaggaaggcagcccatgctggggagcaaaagggagagaaggcgagggccagagccctgggaagtgtcagatcctggtgtgccgcgcttctcccaggttgtataatcagctgtcacttcagcatttccctgcatcagccttcccaagtacagattgaacattaaacaaacagtgacggctttataaatatttaactcccactgtttaggaattgctcggggcaggagacaaaataagagttcctggctgtctgctccatgccccctctggcatggtgttggaggccgggggtcagagatttggggagtggtgggcagcagctattctcttcttcctttccagggggatgtgtttggggacacatgtctgtgtgttcatggagctgttagggcctcttctagaagccaccagtttgcgttttcatacagtggctgggatccatcattgctggtgttattccttcacatcagagcaaacttcttcctttcttttttatatatagcagctttattgagatataattcacatataattcacctgaaactcacccatttaaggtatacaacacaattttttttgtttgtttgtttctttgagacagagtcttgctctgtgacccaggctggagtgcagtggtgccatcttggctcactgcaacctccgcctcccgggttcaggctattctgcttcagcctcccgagtagctgagactacaggcacacaccaccatgtctggctaacttttgtatttttttttttttttttttttgagacagagtctcactctgttgcccaggctggagtgcagtggctcgatgtcggctcactgtaagctccgcctcccgtgttcatgccattctcctgcctcagcctcctgagtagctgggactacaggcgcccaccaccacgcccgactaattttttgtatttttagtggagatggggtttcgccgtgttagccaggatggtcttgatctcctgacctcgtgatccgcccacctcggcctcccaaagtgctgggattacaggtgtgaaccaccgcaccagaccccaacttttgtatttttagtagagatggggttttgccacgttgcccagactggtcttgaactcctggccttaagcgatccacccacctcggcctcccttagtgctgggattataggcaggagccacggtgctcggccaacacaattgttcttaatatattcatggagttgtgcaaccatcaccacaatcaatttgagagcattttgatcaccccaaaaagaaatcgtttttattagcagtcacctctttattcccacaattctctgcgtgctaagaaattgttgagctacttgtactacaaatatacctatcctggaatggtcttttgtgcctggcttctttcacttggtgtaatgttttcaaggtttatctgtgttgtagcatagatcagcatgtcatttctccttagggctgaatactgttccctagcacaagtatattgcatttttaaaaatctactcatctgttgatgaacatttggggacagcaaagctctagttgaaaaatcaagatgaaaaatcaaaaaaatatagttgaaaaaatcaaaaaaatctagttgaaaaatccagcatcatgtgattaaggccaaactcaacttcacaaaagagagcctctactattttgggaaagatctagaaggttatctgtaagcatatggtggatgttacaatgtgttcagtggacacgccattcagcttttattcagcacttaccatatggtgggcactatggtaggattcattaattaatttattgaaaataattattgagattatatagtcttgtgaaaagatttatcagaggctgttctgtgaattttagaggttttttgtttttgttttttttttgaaatggagttttacttttgttgcccaggctggagtgcagtggtgccatctcggctcaccgcaacctctgcctcctgggttcaagcgattctcctgcctcagcctcccaagtagctgggactataggcatacaccaccatgcctggctaattttgtatttttagtagagatggggtttcaccatgttggccgggctgctctcgaactcctgacctcaggtgagccacccacctcgggctcccaaagtgctgggattacaggcatgagccaccgtgcccaggtgagttttagacttttttggggtgtaagaatgggagcatgagtttgtgttctcagctcgtttcatttgatttcagatgtcagctctctttaggagagaggcgtggagaaaaggtgggactctctgcagtcctgttcttgttctgcccacttccctccagtcatggtctctggccggctctcttctccccagagtggttcttttcctgcccctggtgtccctctaagacccagatgtttccagcacccatttgagaggctgattcagcccaggcagtgtctggcctagggaaggtgactgcaggaaatgttaaaaaatgggggctgttatcatgcctgagcatcgcacagtccctccgttgtgactaattgtagtggttgttgttgaagggctgccccaggtccccctccctggaccggtacactcaccccagctgccgagacggcggctgctaatgtccactgctgctaatgtccacagcaccacttctctggagattagccttcctccaactggagctgcttcatccgggaagttgctcaccctgcaccagccctggctgactcaggggtgcaaagggctgctcctccttgtttccatgtggggtaaactccatggtgcggttcatgttccagggcatcctgtggatggcctgagttggtccccagccgagaccacctccttcccttgcctggctctgccaccttcccttcctttctcctgaggttgctccctgttaaatcacacagacagacattccctcctcaggatctgtccccgggtgcccaccctcagacactatccggcaacacgttccctttcctgagtcccctctgatgatgtatctgacttggagatccttggcctgctggctctcttttcagttctgttctggagaatagaagcttcctgggctggcctgttgagtgttttgtttggttggttttgatttccaagtcttttcaggctaatcggacacgaggaaaggtctgcattgaatcacagccttggcactgttccccccttccttccctcctccgttcattcccccgaacatccttttctgtgccgacaatgacctcagcagaaaggggaaaaggacgtgggaaggctgcatgggaaactcatggaacttggtagcaaacagctctgggttcaagtccgggccctgttgctcaggagccaggcactcagttgtggtggcttctctaaccgggaacttcttctatgaaaatgggactattcgtctctactccttgcattattgtggggatcggaaataatctgggtcaatgatgtggtgcagtgactagcatcgaggggacaccctctccacacaggctggaaagacatccagaaggagtcctgggctccctcaccacgcaggggctcagcctcgccagatagttgtcatcacccatccaggcccgtttctggtctcattgcttttgttcatgtactttcctcctgggttgctcttccttttctctctgacctgtcaaaaagccccattgtaagcaacatttaaatgctacctcttccatgaagcccttttggatgcctcttagggggatgagttctttccatcctagcactgcttgctgcatggtccaggatctgtggggcctgtcttctttaccactttgctcacttcatgaatgtgggggtgtatgaagagtatgatgaaattagaggctatgttctggagtcagactgatcagtactgggattctggccataccccctccttagctgggtgactttaggcaactgactgtaccatcctgaaagtcatctgtaagccgtgctgaccccccaaccacaggacacttgtgcccgctgcaggtgctctgtcagcagtgacttctcactacctggcatcctctgaattcacgagcagtttgaagaatgagcaaatactgagcaaagctcataggattaaatacacacagacctgtgtaagttaacaccaagctaagggttaaatactttacaaaaattctcagtgcggttggtgggtgagaagggctgtcgtcccctctggctgccttgccaagctggtagaggggccatctcccactacctactgacaaagattctttgcttgacccaattacccaatttaatcagacacttaagtcttttcctaggcccatctgtgtacttcctgtaaaatctagttttagcaaaaaactctgctgagtcagtttggtaaggaccaccggccgtcaatatcttccatatctgatagatagggttcctcatcttctaccaccctccagatgatgtctggtcaccctggcctgcctttagcaagaatcttgataggttgatttaaccagaatcccccttactcctgatgttgcctgttagtaattttctatcctctgacccccaccctgcttcttggctgtgaatttccacttgctcaggctgtattgagttgagccctatctttctcctacactgcaaattcccattgccgtggtccctatacctatcaggatggtcctgaattgtcttctttatcatctgctctgctctgccagagcttaagcccaggcagctgagttaaaagtgtgaccaaatggaccatcttgtccctgaaaattgggacctaagctcgattccgagatttaatcatggcagaggagtttactctgctaaccaccatcaccccaccctatcccccagaggggtgcggtgagtaagggggtggcaactggttgtttccaatctcccatctctctctggccctcctctgtctctggcctcccttctccctttgaaagggacacagtgctgctcacagcctgtcctgctgcggtggctgcagagaggggctgagaataagcctgtgtccgaggcagccctccaaatacagcagggctgggttgacctttaaatagatgggctctgggccactcagttcctggaagtttgaagaaagtcagcctttcaagtgatgcgacttccaacctcaggaaagatcgctgtgtttgtaaagggtataatttactgttgcttttgcacttcatgatatgcggctgcacagccagtgggagccagcatgccagaattaggaggggaaaatcctcaagtattttaatatacccctacttagaagcaagataaacatatgtattgtactttgggacagaagcaaggggggtttagcgggtgggaaagggagagtcctggcattgcatgaaaggtctttttaagctgaactctgagggttttcagtttttcatttttctgttttttttttttttttttatttgtaagcaaagctggcatgagcaaatgatgccaggatctacttggctgtgtaaaagctgtagtccctcctcagacaggcagactgctagaaccctccctaagccataaactagtacaccgttttgcctcgcccaattaaaaatgattgggtgtgggttgtcatcacagttgacttagatgatttactttcttccaggaaatcttcctcccaactcttgctttgcaattaggcaaaagaaaaataaatgttaatatgttctgtgctcccagggaaaatttttttaaaaagaaaataaaacactttgggaggccgaggcaggcggatcacgaggtcaggagatcgagaccatcctggctaacacggtgaaaccccgtctctactaaaaatacaaaaaaaattagccgggcatggtggcgggcgcctgtagtcccagctactcgggaggctgaggcaggagaatggcgtgaacccgggaggcggagcttgcagtgagccgagatcgcaccactggactccagcctgggtgacagagcgagactccgtctcaaaaaaaaaaaagaagtgtcaaggtcatgagtgtcagggaaagactgagaaatggttccagactgaaagagactaaagagatgtgagaattaaatgcaaagcttgattctggacaattgtcaaaccttggatggctgggagcgttagatgttagttacgtatctgtgtcagcttcctgatcttcctatagaacatggtcctaagggagaatgtctttgctttagaaaaatacacatggaagtactctgtagtgatagggcttcaggtccactactccctctcacatgctgtaggggaaaaggatttgctgtgtgttcccagcacgtttgtgattatttcacaaataacaataattaaaaaaaaccaacctctggtggggcggtgcggaattattattatttttttttgggacagagtctcactctgttgctcaggttggagggcagtggcatgatcttagctcactacaaccctcaactcctgagttcaagcgattcttgtgcctcagcctcccaattagctgggattacaggcatgcgccaccaggtctggctaatttttttgcatttttagtagagacgaagttttgccatgttggccaggctggtctcaaactcctgacctcaggtgatccaaccacctcggcctcccaaagtgctgagattagaggcgtgagtcatcatgcctggcagtaatcttttcagtggagaataaaataaacccgggtttgaattctgaccctttaaatttactcagggtttgacttcagccagggaacataacctttctgtgcctcagtttcctcatttttcaaaacaaagatggtgtgtgtgtgcatctccatctatgagttgttgtgaataggaatgtaggggccccagcagggtgtgtaaaggtaccagttcctggggcgtcaaaggtttttctttcccttcgtaccccctcactgacatgcccaggtctgtctgtgtagagcagtgggtggatttacagactccgctgagaacccccttatagcatattttcaggttcgtgatgatatcatgggctgtgaccctgggagtttaattggaatgaatttcaaggttttgttaaacttggctagaatcttcctatatctccagcaagatattgatggggtttttgttgttgctgttgtttttgagacagggtcttgctctgtcacccaggctggagttcagtggtgccgtcactgcagcctcaacctcccaggctcaagggatcctccccttcagcgtccctagtagctgggactacaggtgcgctccaccacacccagctagtttttgaatttttttgtagtgatggggtttcactatgttgcccacgctggtctcaaactcctgggctcaagccatctgcctaccttagcctcataaagtgctggaattgcaggtgtgagccactgcacctggccaagaacttggtgtttcttatttccaagcttatctcctctgttatttgctcccagggagaccccttttccatttatgtttccagggtgctggggggaagtgattgccctcatctcttttgcccagccaccaaacccagtgcagactctgctgaatgcaggccccatctctgtattttacttattccatttcctgtcttgaaggtgggggcactatgtttatctctaggaccctgactggctcatcattgaaagcttattttgtgcaaagcattgttctgagcactgtgtgtgtatgattctacttcatcctctgtaaccctagcagtccggtcaaatagtatcattttatagacaaggcaactgaggcacagagcagctcagcagcttgcccagatcacacagctggaaagtggtagagctggaatctggatgggtgctggcagcctggcctcagagtcggtgctaaccactgagcggcactgccacccaacggatgggagcctgcaggatgaggccatgggaattgatttcactcagcgcgagccaagcagaactcccgtccagacctctgtccaccaccctaataaagccagtgtttacacaggctggaggtgctcatcagatgtttttgccaatccccaaatacggccagggccagaaagtgagaggggtgcctattatgtaaggccctgcggctggtccccagacaatgccacttcctcgcttggcgctgtgtgactgcataacaacgggttactcatttcctctggaaaacttcacagggcctctttgccccatttcctcctcccaccccatcctcaggcttcctctgttgaattttctccagattcctgggaacaccaccatggagggcctggcctttggcggtggacagtctgtggctgggtgggaacgtcaggagtggggcctgcctctttgctgggaatgccgtgcactcccagcccacttgccccatgccagcactcgaggcaggtgaggcccagccatgggtataaggtgctcccagggcgggattagcctcaaggaggcagggggtccatgtttctgctcctctcccattactaacgggtgtctgctttaggtttgatctccctcccttctgcccctctcctggtaaagggatgaataatgaaggccttccttgggaagtctgagatggattaccccaaggaggctcgaacatgggaggacatgcgagaactattgtcacatgagttttctttctatcctgtctgcaggacttcgcaggtgagcagtaacggaaatcagccccgtttattcctcccagcacctgccttatccaactccccacgctgtggctgagtcccagcctgctatggaagcatcactggactcccattgaactctgtgcagattcgctgttcgtagacatggtacctgatggacaccaagctacgtacagcttcaaggccccttctttctttgctaataaaaaataaaaaataaaaacataatacacgttatatttctatcttataatacacatttcttatttttatctcaataagctgatatatagtagatatacacatctctgactgtacatacatacacaaacacacacacacgtacatgcatgtatatgcgtatctatctccaatgcatgtggagtgttgtgccaggtcatcctcacatttaatttttctgttctatttatcattcttaaggattgtcaggcattagggatttatctatagcaatttggatcttagcagttcttttcatgggttatcttattttttccttccaacaaccttggaggctataaaagggcatattattgcccttttatagatgggaattaatttattagcaaactcagtttcatgattttttttttcttttgagatggagtttcgctcttgttgcccaagctggagtgcaatggcacgatctcggctcactgcaacctctgcctcccgggttcaagcgattctcctgcctcagccactggagtagctgggattacaggcatgcgccaccatatctggctaattttatatgtttagtagagatggggtttctccatgttggtcaggctggtctcgaactcccaacctcaggtgatccacctgccttggcctcccaaagtgctggggttacaggcgcgagccattgtgcctggccagtatcatggatatttttaaagtgcttgttgtgtgttgggcactactatgtcctgcatttagaaatagaactcattcctattctctgctttcccatggagagaggcacaaacctgcgggtataggtgggtatagtttcttaatgtgcacaccatcgtaaagtggagaccctgtgcgtgagatgtgtgctgtgtacagggtgggcaggagagagactggtgaggggatgatgcccttatgctggaaggggcaagatgaagcctctctgggtttggtgggaccttggagacatctgcctagtgtgtggtcacccagaggccaaggatgtgctgtttctacttgcttgctgctttctctgggagtggccatttcttccaaggcagtgtaagagcctgggcataggagccaggcagaactgtgtggggatgttgcctccatagctttctagatgagcaaccttaggaaagtttgaacagtttctctacatcctgggttcttcatccatgaaatgggaattattgtttgagcctctaaagtgagacagtcaaatgagatgggcatttgaagccttcagcagggttccagcctcacagctaactctcaactagctgtgatggttacagagctgtaggttgctcataagtcaacattgtagttgctggagccatcaactcagctataggatacaacactgagcccttttcactatcctttgatgggtctccttttccctagtatgggccatcggctaaggtgattgaaaaagggcctttcatgttttcaaaggggcaaagaaacttcagtagttggttgggcattttattgagtagaggtgactccatgcagttctttttgggggaaggatgctgcacattccagggtttaacaaaaatttattgaatgcttactttgccccaggtacctgtcttggtaaaggtgataaataagacagcctcatcctcatcttcatcaagccaccagtctggtggtggtgactggggtggggactgctgaggcattgggccccttgaagccttccctctgggtgtcttcctccccaggatggtctgggctctctcgggatgggaggaagttggtctgaaagtgcctcagtgatcgctgaaataggtttgccaaagatagaggggaaagagttggccagcctttgtttagggactcccagaatggtcttaggtcaggaaagagtgaatgggtacatttctcccaatttctgggctggagattccaaactgactccttcatggcaggcttccttatctctgcaacatttgtttacatgttcccttcatagatttctaacaggatgaagactttgttccttggggtaagggtctacctccaggtgtgtggggaaaagttgagaagctgctaaattcttggctttgacttatcaatggtttttcggagggcctggagctgggctgggactgatcaaatttggtaattgcttaggcagcctccacttttgttgctcctggggccagatggcgttgggctagaaacaatatcggggagttctgtttggttttaactgctgtacctgggtgctctgttatccaaccaggccctctcctaagttctcttctttttttttgagacagagtttcactcttgttgcccaggctggagtgtaatggcgctatctcacagcaacctctgcctcccaggttcaagccattctcctgcctcagccgccgtagtagctgggattacaggcatgcaccaccacacccagctaattttgtatttttagtagagacggggtttctccatgttggtcaggctggtctcgagctccggacctcaggtgatctgcccgcctcggcctcccaaagtgctgggattacaggcgtgagccctgtaatcccggtgcccagccagttctcttctttttttaagcctcttcctttagaaggaagaaaacataatctatatgctggctggctctacacagcagcaggcatcacaaggggtttttgtctgcttttgcttctgaaggtgaacccactatctatttagagaggccaggtcagggtgtgtgtgtgtgtgtgtgtctttttccctagggtgggtattttcattcaggaaggtgttgttatgatcccctgttgtagaagaagcagtgaagttttagggagatgaagtgctttgtctgatgtcacacaactgatagatgacagaatcacatatgtattcaggggtctggtccaaagcctagaagaaggtgagccatgcgtggcccgatggcacagagcatgagctctggttgcacaatcgtgggaggttacttaatcttgagaaacctcagttttcttatctgtaaaatgggacagtatgtatcccaaagggccattttgaccatttatcaaagtcagtttctcctccgtatggagcggagaacagtgtccagcatgcagtacgtgctctgatgatcttggctgtaatgaccatcctggttagggtggatttggccaaaagctggagtaactggtagcttcctgatctgagaggtgtcagtgggtggtgtggcccaaagattgagaatcttgtcaggggtggccacgtgagggtggaagtggtttgaatgaggaatggtcttgaggtaagagttggacaaacagtgtcttctctctctctctcttttttttttttttttttttttttacttttttttgagatggagttttgctctttttgcccaggccagagtgcaatggcgcgatcttggctcaccacaacctccgcgtcccaggttcaagtgattctcttgcctcagcctcccgagtagctgggattacagacatgcaccacccacgcccggctaattttgtatttttaggagagatggggtttctccatgttggtcgggctggtctccaactcccgacctcaggtgttctgcctgccttggcctcccaaagtgctgggattataggcgtgagccaccccacctggtcgacagtgtcttctctaagcagaactgtagccctgaagcgcccaggctagaactctctattgaatgaggatcactccattgtgccagctgctctcatattgctttgatggcctttctcagaaaggagaaaggtggtgctgggtgtggctttggcttcctatggccgccccaatgctggtctgacactttctgaatctggtttgtggttggatctgtgcatcctaccgctccactccatgtcctggccttggagaaatcatttccctcccgccgtgattgttcaccttcaaaggtcaacaaaggcagtaggcactgctgagctcttgcagccttcagggctgagctgcttcctctcctgcttccagtgaggggttgcttgagggtgcctttaggaaggaacctcacccctaatgtaacttgagcaggtctttgctctaaactcttcgctgggaacataccctcccgtgggacttggcatggcacccacctctgcagagccacctgtgccacagaataacctcttctccctagacacactgtgtgtccttggttggattctctagatgggagggaccggctgaagcataactgtgtatgttcacatatgtgccttggaagagttttatacaggaaaggatttgtaaatcagaaaaatgaatgctggtatctaatttcctgtccccgttttaagtccagaccaagtcacctaacccctcgggcttgcagcccgcatcatccactgggtgattaccttgagttatctggttcagtccctttgctgtgggcaccctctttacctctacaagtaaactgcaattaatctgacagcaggggcaagggaactgacgagtcttgggtgcaaatcttgagatgctttggcacattatctaattcattgtttttcttttcttttttcttttcttttcttttttttttagacaggctggagtgcagtggcacgatcttggctcactgcaacctctgcctcctgggttcaagtgatttttgtgcctctagcctcctgagtagctgggattccaggtgtgtgccatcacgcccagctaatttttgtatttttagtagagacagggttttgccatgtaggtcaggctagtctagaagtctggccttaagtgatccaccctccttgggcagggtgccacctgcctgaaagaaaatgcccaccctagggaaaaagacacacacacacacacacacacacacacacacagagagagagagagagagagagagagagaccaacgtggcctctctaaataggtagtgggttaaccttcagaagcaaaggcagacaaaaaccacttgtgatacctgctgctgcgtagagccagccagcatatagattatgctttcttccttctgaaggaagactctaggattacaggagtgagcctggccccaattcaattcaatctttatgggcatcgaacaagggcattatttattacccatggtttacagaagtcaaacccaagtctcagagagggaagacattttttagtctcactgcgaaagtaacagagctagaatttagtctctgtcacgctaaatcgtgctacatgctccgtctagttcagagcctgtgtggaggtcgacactggagtccctcagttttcctcatcaggctcctggtctgattcttccaagatcagtctctttccctcagcggaagccagctgggaatcactggccttgtaacctcttcaggcgacctccttgggatgttcacaaggagcatagccatctggagaatgatactgttttttcctagggctgggatgggggtggtatccctcacatcattccagaaacagcgccagccctgcttttatcagcgggggccacaaagaggcgacaagccctgatcaaatgtgagcgagattgacaatctcagcactttccagggaaaggatgccgtcccacatggcttcaggcctccgaggaagccccatcctgagacagagagaccccaaatcacagtgtgtttccttttggccagagatgaggcttactcatctcagacagctgtgtccacggcatgttcctcaaggacagctgctccagatgaaaagaagagatgctcccagagccttgaggggctgctgataggaacccaaggcctcaccctggggctgtatcctgtggcttcaaaaatatatgtatttgaaagcttctagcaaaacagattacacaagaacgcaaatgtaagatccctttgggattctaactttttttcttaaggtgtttaaagaaaaatgacacccttaaaaagaaatgccatttgttttcaaagctgcagcaccagaggacatggaagagaaaggctgaagtgtccctgaaaatgagtgaagattccagtctgtttttactaatgtccaaaatcttaggtttattgcctttgcgttcctctgccccagggtctctgtgtggcaggcgagtgggtctcgttcgatggtgcagtcatcgtgtggcggaatgcatgctcacacagggaagttggttgagcgtctcctttgagcagtccttcctctggtgaggtgcacaggcgggcatcatgcccatttcatagatgaggaaactgaggctgagagggatgctgcaatttaggacttctgggtgatatcacagaagcctcattctcttttgtggcatgtaccttctctatttgggaagttaaattggactatggggattggaccaaggggtcttcttgcttccgctttctctaggccaaggctttgcagttatggaggaagaaagagctggggtctgtcttggcaaccctgtgactcttctcccctatcctcacctgccttctcacttgaccaacatattttaagggctccatgtacaaaggtggggctgtggccctttcccaaccagcaccttggccctgtaccctgatatgggatggttaaggcacacaggcttcatggatgggggcctacgaccgcagatggagcagaggtggacagggtatggtccggcaggtggaggtgctggagaaaagccgcgttaggcagcacgggagccaggtgcggggtctctcaaagcctcgagtccctggcagtgctgtgctctgtgaggactgcttttgactgcagggcactgacactcataccttttgcttctgcagctgaccatactccctggagccttctcccgaggtgcgcgggtgaccttggcacatacagccatcatgatggtactttaagtggaggctgaatcatctcccctttgagctgcttggcacgtggctcccttggtgttccccttttactgccaggacactgagatttggagaggtaagtggcttacctgaggccatgtgctaacagagaagatgaagagatgattgaaacaggcctaagaccagacctaagggtctgtacattttccacatactttccatatctttagaggcctgaccaaagcagatcttttcctttcttctaggtaagtccaaaggcacctgcctgctgggcccactgttttctaactttcctaactttctgatcccttggaggtgataatcaaatattctagtctgaggcattgggatacatggtgctaggttctgagactctgcgtcaggcctgaaccctgcattttgtggaggtgggtgggagaatgttcccctggggaacatgcctagacacgggggacaacagttgccctcatggggaggtacctgtttactcgctgttatgggaccgctttcacaaaaccactgcaggtgagtgagttcctgctgaatatcaggcctggtgtctctagactcattatttcccccacccaacccctatgttagttcatctcgagccacatttttattgccataatccaggcctggacaggccaagatcttttaacaattttaattactgaaaataataactgcattttttttaaagcccaacttttggtagagtcagcccaaaatacagtctttgtgttgccatctgggaactggatttggaattgttcttccatgagactgcagagcagaacggcagggccagaggtcccacgagctggtcagacccggttctgctccttgctggctgagtgaccttgggcattgtgattcatattctcatctgccttcaagtgtggttacgaatgctttttatcctgcttatcaatttctatgattgccataaaatattaacacaaatttagcatttatataacataatatattaatgcatagtttttttgtgggggggggcggtggaggggcagtgttgagacagagtcttgctctgtcacccaggctggagtgcatggtgtgatcctggcccactgaaccttgacctccagggctcaaggggtcctcccacctcagcctccagagtagctgggacttcaggcatgagctaccacacctggctaattttttgtattttttgtagagacgaggtctcactatcttgcccaggcaggcctggaactcctggactcaagcgatcctcccacctcggccttctaaagtgctgtgattacaggtgtgagccactatgtccggctcacgtccagttatctagggcagaggtcagacatggatctctccaggctaacatcaaggaacctgtaggctgccttccattctggagactgcaggggagagtctgttccttgctcattctggatgttggcagaatttgtttccttgaggttgtagggctgagatcccgttttcttgctggctgtccagatgcattgagcttctggaagcctcctcgctaggcttgtggcctcctctctccattttcaagtccagcaatggtgggtccagttccttttaggatttaaatcttttctccctctttcttttcacctctgtgatctcagctagaaaagattatctaattttaaggattcatgtgattggactggggccaccctgataatccagaataatccctacttcaaggtccttaggtttaatcacatctaggaagttctattgccatgggaggcaacatattcacaggttccaggaaattccgacatgggcatctctttgattggaatgaggggtggcaggtattctgacacagtacctcagaagggttgctgtgatgatgaagtgaatggagacacgtaaagcgcttaaaatattatgtagagccatgtgaatttggcagcattgaattgttgacctataaaaggtcaacttaatagtatctggtctatagtaaatcttcagtaaatgtttgctgtcattactctagtggtagaaatgtcatgctttatttagccagtttgctattgttgggcattactttttaaagagttattattttgttattatagtatatatgtgaacaccgtgatcatcatgcctttgcaaattttattctgatttagggcaatgcatgtctttccaggccacactcagtctcctgctctggtgccagtgtctctgtggcctgaggggcccctctttcttgcagagcccctcatccagcaccagctcagctctgggccatgtgtgtggggtgggacttttctcttttgggaagtgggccatgcctctccttcctgagaccatcccctttggcttcctcggggcccttggctctttgaaccagcctgcagggcaccacacctgtgggcccatttttgtcaggaaacgactcccttcccaagggcaccctgagtcccaggtccccaggcccacagatgttgggccctcagagtgtgatcccatgtccccagctctgtaactccctgcatgtggctcttaagactcacaagcccatgtttgccttggccagacactttcgcctgtcagttctgccagttgggaagtgtcatccccactgtgtgaatgtggaagggataatgaagaatttccacggcttgcctagggtcgttgagcaatgtggaagggatcatggagaatttccatggcttgcctaaggtcatcaagctggcatctcaacccaggttcatctgcctgtgatgacaggaaagaaatcaggtgtgattctgttcttgttgacccatagccacctctctcattaaggcttctcctgcaggcaactacacagccagtggtgggaaagcacctaatttacatcttcatgcattgaaactgatgtcactcacctctcccccttgacctggaagagcccctgaaggctgccataggggaaatgataacccattctacagctgctgaaactgaggcccagggagtgtccagagctttctgaggtccaccatgtactgttgaccaggatgagtgatagccacctggtgacaatgttgaaggttctcattcagtagagctgggttcaattctgacttgcctgaccagctggtgcctcattttgctctaagtattggagcctccagctttattttctttcagtgggaaagactgtgagattcagtccctccttgaagctgcgcatcgactctcctgtcctgggtactctttaggtagtggctgttctgaagtggctttggaaaccctggaatgaaactgtcatgtccaatgctgagatttgtataaactgtcattttaactgtgattattattccttaggatttgagaaataaaatctgaggagggagcaggacctgcctcagggcctcctctccaagttgagtgacccatcttcccaggtctccttttgttctgtcttgagcctctctcctgaggtcctgaaagaagagaatgtgctgttgtagggggcctggaaatgtcccatggaccatctcgtgactcagtaagatgatgtgtgtcctctggggacagaaggaggtcctgcacagagtgttcctgcccgttgatgccctccccagatcctaacgcgaagtctgacacatagtagcctcccggtaatcttaataagcaaaaggacacatttctcaagtgatcttagcaccatttcatgcaatcaattccagcccagccctttattctggccagccctggtgggtccattagctgcaaaaattagtcgtgctcagttttaatgcaaatgactaagtattactttattgaattgattaataaagaagctctctttgtatgatatcaagaccatgaagaaattgcaaagacataggtagggtctacagcagagtttctcagccttggcgctgttcatattttgggtcagatgatttgttgtgggggctgtcctatgtattgtaggatgttgctcggcatctctggcctctacccactggatgccagtagctctgtcagtcgcaaccccagcttccagttgggacaacctaaagtgtttccagacattgccacatgttcttttgtggtggtgttggtggtggtgcgtacatatgtgtgtgtaaaaatctccctttgttgagaaccactaatctagagaccacctaattagggctgacgtgggctcttccacagagccttctccttaaagacagataggttgatggacagttggatttagggaaaagaaaactgagttgagggtttaaagtgaatttcatccccaatgtggaagatgagcgttccgttcctggctgtaggatgtggagcatgttactccacatgtgggagaaaaaaatcatcccatctacttcaggacttttgtgtgattaaagaggcaagatagtctagtgcttttcattccatgcgcactcaataaaaaataggggttatatttatgaatagtaacaaaaagcctcttaaggaaaattattttgggcccttgttcaaggttcagttgaccatttatttttaaagagatgggggtggcccaggctggagtagagtggtgccatcctagttcactgcatcctcaaactcctgggctcaatcgatcctcctgcttcaacatcccaaagtgctagtattataggcatgagccattacacctggcccatttgactattttttctgcttgattgtagagaagggaatgtaagtcatgaagatctaaactataaaacctgcgtggcttagaggctgagcatggattgtgatttaaggaagccccaggttcaatttctggttctgccacttgctagccatggtgagaccttgcccagctttcatactttcaggttctttgtctgtaaaatgggaacaataagagtactgacctcaccgggctgttgtgctactggctgtgctgcctgaatgggccctcctttatttgaatccctctgccacagttgtcccattttttttttttttaaatggtgacccaagttccattatggacgatcaggcattcaggggaaggagggatccaaagcagagacaaaagcagccagccagctcatcccctctgcagctgataccgaggaggaggatgccagtgggaagaagcgtggccatatggctggcaggatgcctcactggtaacagtcagcccggcccctttgaagtggttttaagaccaatttggtaacttgatttggaaagtggtatcgatgactccgagggcgcaggctgctcattagctgctgtctgggcccggcaaattggtttaagtggaatgaaattggttccttccctccccgtgctcatggctgaggtccaggcccgattgtaatgggaacctctcctgggcaaaggacatagaaaagctttccggggagtctgaccctcttttttcatatgtgaattctactttcccctgggggtcaaggcaataggctgataaaacataaaaatgaacctgaagtgggtggggtgagtgtgtgtgtgggaagttggatcagaggagaatgaacaatgaacagtggccgagtgtttttcaagggccagttaaccattcccctgttgagacactgtgcttgatgcattttttttcttttctttctttcttttttattctcccatattacaaacactgctgggaggaacatccgcacatgctttcttggtcacttatgtgagagctcatccaggatttataccctgaggcgacttcactgccgtggaggctaaggaacattttctgtttcataagacgcgatcacattgccctccagaacaatcatgccagtttacactcccactgactgtacacaagagccctgttttcccccatctggtcacccacatttgataggtcagaattttgctttttgccagtctcatgggggtgatgccatttctggtagttcccctgattgccagggggatgagcagcctgccctcaactgccccatgctgaaggccctccaaaggcagcatgaatcctcacagttcccagcctgtgccctgacaacctaggaggacacgctggtctggtccattgcttatctgaaacgattccctttccctgttccttttgttgccttgagtgtcagttttggacctcccactgagcagttttttctgtcacgtagccatagacaggactgagttctttggaaaataatcacatcccactgttgttcccattcgttcattttttccttcaactaaccaacattattcagcactttactcagcacaggatgtggaaccgaaggcctggcttttgggacactcaccgtccccagtcagctctgtgtcctagggagagacccatgagctctctgggcctccttttgtttctctgtaataaaggactaaagctaccagcctcgctgcgggttggaaaaaagaaagagttagtgtaacacatgtgaatgtgtacgaaggggtttagagacagacaaaacattgcaccaaggcagggctcgctggagtgcagacccaggaaaaacactgcaggccaaattgcttctggtctgtcagggtaccagccacacatccaaggcagggaacttagggcgattggcctttctgctcatgcttactctcccaagcttgttgggttattatcatgcacaagccattcaatcgattgtattgggtgcctaatatatcagacactcttaggtgctagggatgtaagagcaagcaaaacagacatggttctgcccttgtgggctgtatagtctagtggaggaagggggaagaggttaagtatttgtaggaaggtgaaccccatgttaagaaagcatcttccatctttcaaatgtttccaagtagctggttattcatgatagcgaggaaatggtggtcatctccattgctctggtaactagtttgtgtctgagaaagtgctgatttccaagaaaaggaaagagaccacggatgaatgatagcaagactattaaacaggaatacaaagaagagctcacatttattgagcacctactatatgtgctggaccctcttgtaagagcttcatacaaattaggcagacaggcaatattattatccccatttgatctacaaggaaactgagtacaaagtgatagcttttctgcagagcttgtgcacaggggccaaagtttgggaacaatgcctttctttaatttgaaagtatctgttgttggtgtcacttgttggaattcctagaatcccagaaaagtaagtttaagttttcttctgccagcatcggtcagcctacctttgacccaaggtcacgactccctccctcctcccttcccttccctgctctgacattcttaccttgtttttgagttccttattccctagcttcctccaagcagcaggctctgggaacagtcccgttcatttatataacaaatatttattgaaatgcagacttgttgttttcataatacctgtgtacaagttaaacccgtggtcacttgttcatgtgcctcttgtttatgacaagaggtggtcccttgttgaaagcctgtcacatggcaggtactcagtcttttctttccttctaataagtaggtgagtattttccttggtttgcacacgaggaaatggaggctcagagagcttaggtagcttactcaaagccacacagctgggttaaatgggttcagcaccatgaaaatctgacctttaatgtctgcactcttattctctggcttattgggaaagaattggacagggatggtaaatggagttgatggaggcaaagagataattactgttgctcaaaggtggatcgagagagtttgggcaaaaacggaaccacgaacaagccgttgaaagtcccctcatcctggacctgtggtctgtcctttgtaactgctctttttttggcattccctctgtctcctctgcccatcccaatgccaggcacactgagcctgtagggatttacaaggtgggcctcaggtttctcccctcccaggtgggcataggaatcactgcttagcttagatttggcagaatgaaagagtcaggcagagtctcacccggccctgtttcttagctgctttgacacctggggcaggtttttggacctctctggacatggccagctgtgttgtgactgcccaccagaggctgggtctgtgaatggaagactgaagaaaaggcgatgatcacagtccagggacaaggtttctgaatcttgtgaaatagttacaaatactatgaaacaggaatacaaagaaaagctcacatttattaagcacttactttgtgctataccctcttgtaagagccttgtacaaattaggcagacagacaatattattatccccattttacctataaggaaactgagtgcaaagtgacagcttttctgcagagcctgtgcacaggggtcaaagtttgggaacacattgcctttctttaatctgaaactatctgctgttggtctcatttgttgaaattcctagaatcccagagaagtaagttttagctttcttctgccagccccggtcagcctgcctttgacccaaggccatagtaagttccagagtgacttcccgtctgttttattatccctgacaaagggatacagtattgtgcggtggctgtggatggcgtgtagtagtgttttccttctcttgaaaagcagctgctgagtggtggagcacagaggtattccctgagccccagcttgtgcccatggtaggtccagggcgtttgggggaaggagaccgactctaggtggtcccgtctggtttctcaggggagaaaattcatagatccatctcctagctgtcatccaattctgtgtagaaggggaaagccaaggttgccctcagattttgatcttggttcactctgatttctctatgccagactagtagagcttcagggaagcttggtgactatgactggatgaattctgtcccccttaaaaccataggttgaagtcctactcacccatacctcagaacgtgactgtgttcggaaatagggtctctagagaggtacagttaactgagctcacgtggcggggctccaatatggtcagactggtgggtgtccttatcagaagaagagattaagatgacaaaggaggagtgaagaccacgtgtagacacagggaggaggtggccatctacaagcccaggagagaggcctcagaagaaacaactctgaccacaccttgatcctggacttctggctttcagaattgtgaggaaataaacctctgttgtctgagcaacccagcctgtgaaaatttgttgtagcagccctggcggatcaatacagtgaccatgagcaagtcactcaccctctctgaacccccttggtctcagctctaaaaagaagcctgagaatttctgcctcacaggctgtggtaagaggcatcagaaatagccgactttcatcggaggctcactgcgagccagggcctgtttaagccttttccatgtctgaacacacttcatcttcatgtgtagcctttggctggggaggggagatactattgttcccattttacaggtgaggagagtggagcacagagctgttaattaacctgtcccatgttagtcagcaaggaaggggctggtccatatgtggaacttcgtagttgtactctggtgcccacacaccagatcactatgccgtcccagctgttgttacaataagactatgtaggtgaagggcccacccagtagtgcctggcctatgggacacattgaagaccagccccctgtgaccagaacctcccatttgctgcattgagtttggaatgtttgaactccaggagctgtgtgtgtgtgtgtgtgtgtgtgtgtgtgtgtgtgtgtgtgtgtatctgtctgtctccctctctctcctctctcccctaccttccttttcttccctcctgtttttgggagggagctcagcctcccttcactgccactgcccatcagcatcctctccctattcagccacccccaccccccatccctggtattaattgactttggctcctgtcctggagctcagcctggcacccagacctgccgtgctatactaacacctctcacatggttaaaccaatgggggtggcatttagcagatgacgctgaaacccgtgaatctgccctttctcactgggccctcactgctctagagtccccgcctcttttacgaagcggctgtcatggttgatgggtgagtgtcaggccccacccagggacagggaggcccagtgccggctgtggagttacccagaccttacggtaaaaacgcatcaccctgaatgggggccaggccaggcatcggcccaagccggccctgcccagcggctggattctgactcgctgtgccttagtcacaggccagagactcttctgcttccagctgaggctgtcccctgccttccctggcggcccgggttcctggaaaagctgtgtgccagaggacgggagtttccctccaacttaagccattagaaagctcatttattgagcacttactaagtgtcagagactgtgctaggcactttacatgaatcttctcatttaatccttttaataaacttccggggcacatgctcttctaatctcccttttactgatgatgcaggcttgacagtgggaatgctaaccgcagaaagcagctcacctcacttgggtgctactgtgtgccaagtcctggggttagcacccaatagccccgtggcggcatgctgttattactctccctgcataggagtgggaggctgagacctgggtgtttctgggtgtcccagctcctgtatgccatctgcctgtccagcccttagccacaaagctgttgtgccatgtggggagatgcggccagtttcccaggtgaggctggtcctgcttcaagcgtgggagctccaaccactgctccacgctgcctccactcctgaacctgaaggtggaggagtttcccactgtctcaaataagcaccggggcccaggggtcaccaggctcagatggaatttgcttaaaggactcttgggagaaaagctgattgggggatgggaagagacagctggcagtcacttaggagacagatgtgtcaccagaactaaagactgacctgggaggactgactttcacccaaaagggcctgggctgggaattctcctttatgtctccttccctcacactcaagattcaggtgctcacaaggagcaccttcgagtgaggaggtgtaggagggaggatggctaacagctcagtctgctcagcacttttacagtttataagccatttcacagacattatctcactccattgggcaatcatatgggaatgcaagccactgtcttttcttttcttttttccaaatggagtcctgctgtgtggcccaggctggagtgcagtggtatgatcttggctcactgcaacctccgcctcccggattcaagcaattatcctgcctcagcctcccaagtagctgagattacaggcatgtgccaccatgcctgggtaatttttgtattcttagtagagatggggtttcaccatgttggccagactggtctcgaactcttgacctcatgatccacctgcctcagcctcccaaagtgctgggattacaggcgtgagccaccataccctgtgcccctgtcttactgaagagggaaccgaggcttccttagagagggagaggaccctcctgggaaactttcatcccacctgctccttctaccccagtgcactgctggagctcaatattcctgaggcaaagctccctgcacagcagtgtccacagccgtgttgttgtcatacccgtgcactagcagagagctcaggggtagggccctgggtaggaaacccagggcaaggccagtgggtagagttgatgcaggcctcaggctgatcaaaaggaagacagcgtcacagcatggatctgacatctgagggacgtcagatcacagaaaggtcttgagattagagctgaatgaatacccctaggagaaactaaaaggcgtgtaacaaaggagtacaatatcaacagcaagcctcccccggtcattacatgcctagactgtgcctgaacctcacatttgtcattgcactggtccttggcactgtccttcaagggaagaactgtttgccctattttgcagactaagaaacacatccaggaagcagctgagctgggaattaagcccagggttgatcccaaagcctcccttctttccatgctgctctgctccttacaaaaacaaaaacagaattcctttttttttttttttaagatggagtctcactctgttgcccaggctggagtgcagtggcatgatctcggcttactgcaacctccaactcctgggttcaagcgattctcctgcctcagcctcccgagtagctgggattacaggtatatgccaccacgctcgactaatgtttgtgtttttagtagagacgaggttttaccacattggccaggctgctctcgaactcctgacctcgtgatctgcctgccttggcctcccaaagtgctgagattacagacgtgagccaccgcgcctggccaaaaaacagaattctttcaatgttgctctaggaaatttatttttaaaaaatgaatttccttctgcaatgcctggctcacgaccgattgtagatcaagaaacagatcttgggcctttgccacccaagcaggttcagaaagactgccctggcctccatgtgcccagggaggccagaggagcccacagtttcactgtctcagcagagctggaggaacctgttaaactgtctaagaagctaataaaaaaatcccagtgagatcatgtctgttaaagccctttgagctccctgagctctgaggctgtcttaacactcactgtctcattgcttactcagcacaaatttccccagggctgcaaagccccttccctgtttccagacccctggtttcctcactcatttcatttgatgcttcctttacatcttgaagatctgccatttttttctttaaacaccctattctagaaagaactggcatgttttgggtacctattttgtgctaagtcttttttctccattggctttatagtcatactttgaaacaaaatgtaatatgtgccctcattttccgatgaggcaacagaggcacagtctggggagctcagcaaggtctcatgttttagaatcacaagctgtgtctgcacctaggttgtgcctgcattttttttttttgagacggagtctcgctctgtggcccaggctggagtgcaaaggcgcgatctcagctcactgcaacctccacctcccaggttcacgccattctcctgcctcagcctcccaagtagctgggactacaggcgcccgccaccacgcctggctaattttttatgtttttagtagagacggggtttcaccatgttggccaggatggtctcgatctcctgccctcgtgatccgcccgccttggcctccgaaagtgctgggattacaggcgtgagccaccgcgtccggcccgtgcctgcatttttcaggtcattctctccagtaggcagaagcttctctgtccttcctcaatgggagaacaaggacctgtctggaatttggctctgaactgatggttatggcacattacttattcttgctttgaaggtcaggctgggcaatctctgtccttttgaattgtcctggagtatcttggccccgatctgctgggagatcaccctactgcaacctccctgtgcaggaatgcttttactggactctgcataaaatgaatgaacagatagatcttgatgttggagatatcagcctgtagattgcctgagaacctgactcaaaccccactcttgtctccatctgcaaaaatcaggctctttggaatacctttatcaggggatggccataaagattgttagaaaaataaattataatagctaacatttatttagtatttagtattatagtaacgtttatttagtatttagtatcagaaaccattctaaagtttgctctggtagcaacagcactatccacacccctcccaaattaaccatgagataaattgaacgggtaatttgcttccattttacagataaaaaagctgagactgaaactctaacttgcagaattgggctgaaacccagatctcctgagattagggaagacattcccttctccctactccaagaaatctgttgtgagctcatttctatgtggacttcctagatgactggaacattttttttcttcttttctttcctttcctcttcttttcttttgtttccttttcttttcttttgctacagctcacgtaggtgcctcgttcataatttctccttcccagtagaatcccaactacagaagatacatacataaatgcaaagcatggtctaggcaggttggctccaggactttggagaaaacgtgcacaaaacttgaaatactgatcatcttgaatatctcttaattactagcagtaaggcacaaccatatgcaaaaagaaaccaaaaccatggacttttgccactgcttgacattgctccaagaaaaaacttgcctttgagggtgaagttgacctccgttactcttaagtttccttatgtgcctcagaatgttatttgagaatcattctgagggatgacagaggcctgcaatacctatgtcttaactagaacagatgctttgtgatgaaattgtcttgttgtggttgtgtgactgctgtgactgagactcaacaagtacccacttttttttttttttttttttgagacagtctcactctgtcaccaggctagagtgcagtggcgccatctcggttcactgcaacctctgcttcccaggttcaagcgattttccggcctcagcctccccagtagctgggactacaggcacgcaccaccacccccagctaatttttgtatttttagtagagatggggtttcactatgttggccaggatggtctcgatctcttgaccttgtgatccacccgcctcggcctcccaacgtgctgggattacaggcatgagccactgcgccaggccaacaagtactcacttctacctgtgggtgtggttcagcgcccccagtgcctctcccaggtgggagttgcctgccttgagcaggtgaacaaactgaggcccagggagtggcttccccaaagtcatacagtgtagaagaaggattcgggcctctgagttcgtggattcctccatgaagcaatgactgagctgctgctctgcaactggtgctcggcttggtcctgggggtctgtgagctctgtaccatgggccagcgctttctgtgtgctgccacatttatcctttgcaccaccctacaagcctgtcctccaggtcctccatcctttattcaaaacatttaggatgaattatgtttgggagtttatcctgttttgagattttagaaacgcaatacagtacgcatatcatactatgtgttatgggctgaattgtgtctctgcaaattcacatgttgaagtcctagtgccaaggacctcagaatatgactggatttgaaggtagggcctttaaagaggtaattaagttagaattaggctattagggtgggccctaagccaactgggctagagtccctgtaagaagaggaaatttggacagagacaccaggatgcgcacacacagagggaaggccatgtgtggacacagtgaaaagacagccatctgcaagccaaagagaggcctcaggagacacccaactgccaacaccttcaacttgatcttctggcctccagaattatgagaaaataaatttctgttgttaaagccacccagtctatactccttttttatggcagccctagcagaccaatataccgtgtgtctggggcagtgcctctaaccaagcccaaaatttctacagggaaatatattaattttcatagtaagtgggataaataaaatccataaatagcttcatggtagttcaggtcaagatactaagtttccaacacacagtataagagttatgcccaagagtctgtaatcccctcccctcccctgccctcccctccccttcccgagacagtctctgtcgcccaggctggagtgcagtggtgcaatctcggcccactacaaccgccacctcccaagttcgagtgattctcatgtctcagcctcccgagtagctgggattacaggcacgttccaccataccctgctaatttttttttattttcagtaggaatgggattttttcatgttgcccaggctggtctcaaactcctagcctcaagtgatctgcccgcctcggcctcccaaagtgctgggttacaggcgtgaaccaccacacccggctgtaatatcatttctattctgcaaataaaaagccaagctccaagaggcttagtaatttgcccaagatgcccaattagtttctgcaagggctaaatttgtagctgggtagttggcctctaggcctttgaatttgcctgtcatactgtaccacctctttgacagagatagcctgggttagtgccctctcagagcttggggaggtagacaggtacatctacaactatagtatgtcacaatggagtgtgagaagggcatctgggacccaagctcaaggggaagagccttggctttggccccagcactcagctgttccaggttgagccttagtgcttgttccacaggaaggatggtgcagagccaggctggcagggctggggctggagctgaggctgagaggggcctgcccctcatccatccagcaccatcaaaggcctttccttggctggcaagaagggagctctgaacagtctgctctgtctttccatactgtgtagggacagatagggagctgttgcaggagaaagaactgccacctcttttccaggttccgtggtgaagggaagacacagctctgcagtttaattttttgttgttgttgtgttttttctgtttttgttttttgagacgaagtctcgctctgttgccaggctggagtgcagtggcgtgatctcggctcactgtaacctctgcctcctgagttcaagcgattctcctgcctcagcctcccgagtagctgaaactacaggcacgcgccaccacgcccagctaacttttgtatttttagtagagatggaatttcaccatgttgggcaggatggtctggatctcttgacctcgtgatccgcctaccttggcctcccaaagtgttgggattacaggcgtgagccactgcgccctgccagtttaatttttttgtaagtctcatgtttctctgcaaaacttgaaaacagggtctgcttcacacttgagctagagccctccttttagcagaagcttgttcttattttttcatttttattttatcttaagaatggcctgtcataggcctcattattatggtaggcactattattactattattatcatcatcactatcattatcactttttattctctctagtgattaaccagtcatcactggcctagcttgcatggtggtttaatgcttttcaaacaacttttcaaccaccatttacctctactttagctactagtaccatccctattttgcacatgtggaagtgtaggttcagagatgccaagtcacttgccccaggttgcacagcttggggatggcaggatccacactctgctcccgagcactaggaaaagcaccatgatagcctgtgacatgaagccctctacagactcaagtttcaggggtggttttaaacatgtcttctggctggacacggtggctcatgcctgtaattccagcactatgcgagaccgaggtgggcagatcacgaggtcaagagatcaagaccatcctggccaacatggtgaaaccccatctctattaaaaacacaaaaattagctgagtgtggtggtgcaagcctgtaccgtgcagctactcaggaggctgaggcaggagaatcacttgaacccaggaggtggaggttgcagtgagccgagattgcgccactgcactccagcctggtgacagagcgagactccgtctcaaaaaaaaaaaaaaaaaaaagaaaagaaaagaaaaaaaagtcttctgcaggccatgggggacatggtcttcattttataggtgaacagactgagatacaggaggagtcacttgcctagggccaaacagctcgttcctcttcaggccttcccggtcctgggagcgagtgtttctctttgccttgggaggctttgcagcttgtgctgcgcagctgatagcactgcaacccctgaacatgcacacacacacaaggtgcacacaggcatgcgcatggcggggaggtgtgggtgcactttccagcttccctgccgtgcctcgttctgcagggcaaggccgagaaacagcgggcagcctgtgtgatatggggacagacatgttctcagatcttggccatggtttctaattccctggcaccagaagccctgctgggtgatcaaagctgagtgcccctaacagaaagcagagaggcacatgggaatgacaggtggtgaggtgaagggaacacgggcgtggcatcaaacaggatggacagagtggttggttggctgatctaagtgtggaggaggttgtaaactattcatttaaatgaatatatttattcagcacctactataccaaccttagaaaacttcatactttctgtttttttctcttctttttttgtttttcttttcttttctttctttttttttgagacagagtctggctgtgtcgcccaggcaggagtgcagtggcgcgatatccactcactgcaacctccgcctcctgggttcaagtgattgtcctgcctcagccccccgagtaggtgagactacaggtgcacaccgccatgcccagttaattttttgtattttattggagctggggtttcaccgtgttgcccaggctggtctcgaactcctgagctcaggcatccgcctgctttggcctcccaaagtgctgggattacaggcatgagccaccatgcccggcccatgctttctgttttatttgatcccctttttggggaagacagggcaggttgaaaggtctgctttccaggggaggaaactgaggctcagagaggagaaagtcaggcgccagaggtagatgagagccaggatttgacccagtgatttaggattccaagtccaaggctcaaagtgtgacttgacagctgcaatctgggatctggatgtgtgccttctgtggctcggtgactccagaatttttccaacatctggttgtacggaataacaatagtagcacgaatgatcccatagctgacagccacgggagccatgtgccaggcctggttctaagcacatgtcatatttgaactcacagagtcctcctagctcactgtgaagtggatactatcgaaggggagtcttaagggtttcagtcagttgtcacggtcacagcaccaagatgggaacccagcaggtggcctgggtcctcatggtttgctgctgttctgtgctgccccttagcggggtggggtggggtggggtaggtgggctcaggcctgcagagcttctgtgtggctctaagggagaaagagcagaagggagatttgggatgtcttctgagtgctagccacgtgagtgcattttaccaagcgaactgatgactatcagtcccctgattgcttcctgtcttatgtttttatcttatccacgcatttagtgggcatttataaaggaattctggtattctaaatattctacactctggggatataaaagttaaaagacccaggctgggcgcggtggctcacgcctgtaatcccaacactttgggaggccaaggcgggcggattacgaggtcaagagatcgagatcagcctggccaacatggtgaaaacccatctctactaaaaatacaaaaattagctgcacgtggtggcacgtgcctatagtcccagctactcggtaggctaaggcaagagaatcgcttgaacccgggaggcagaggttgcagttagccgagatggcgccactctactccagcctggcaacagcgcgagactctgtctcaggaaaaaaaaaaaaaaaaaaaaaaaagacccagtgcctacccttaaaggagctcttcttattgaaactctttaaggaaaggaggcaggaaacagacatctttaatgggccagaggctgatttaggctgttcagacattgttaagctgctcagcatctgaagttcaaagaggctgagaacaaaccggttaggaaatggcagaagggggttgggacctaggtgagcagcccgtcaggagcccctgggtggcttgcactcctagccccaagtgcaatatacaggtgaggcgcctgcagaattttcattaggctgagttcatttctggaagcagggaattggcatccacttaaccatccctaatgcctgccttttcatgtatgtctgcacttacttctggccttccccggatgcagtatgtgattcctggaaggggtctcctgtacgtcgtagttttgtcatcttcaggcaacccaggatgacatgatttctggaaatttccctgatttctttctgcttcactctccctcttttgctagaagggatcggcttaggcagccattgtggtgttcattcaacatgtccagtacagcctgttactgcagtttccaagttggagggtccgtgagtctactcccttttttgaacagaggggtacatggggaagctgagcctctgatgaatgggttgatttgtcccaggtcacacagcttgagggtggcagaagccagatctcaggtcacagagtggctctcctccatttgcctccctggtcttgcctcctggaggcctgtagataggagacacccttcctggaaagacaacagcttggggacattacagataaggctgggcgggtgtgcctagctagcccagaataaaaggatcaccgagagaagttaggaatcgaccttccttgaggtgggttctgcagataaagatgcttttgaagttcagttggtgggagataggatctttgtggccttctggatggatgcaccacgatagggaaatcagcaagctgaagatagggaaagtgaacacttatcactgaaggcctctgcagggtttgctttgaggtacttccttcctgtcaaccctgttctggagtctgtctccatttttcagacacaaaaactgaggcatagataactgttttctgttttttgtggggagagagtattattgtttcaatttcctggacacttcaaaacatagggtatttctcattatgcaatagtttaattgagcacatactgcaggccaggcatggtgctgcatgcattctggaagtacaggaatgagttggaagtgctctttttccttagagattttttgttctcttgtgtgtgtgtttgggggtggggggggcgggcgggcacgaataggggaggaatttagatgagaaatcagataatcacagccaaggtgcctgcctggggacacagggtgccataggcacacagaagggcccagggtgtggacttagggtggtcaggggaaggaaggagtttgcccagagaagaggcaggagggagacaggaaaggtaagcagaggccagatcctagaaagaccattttgactttgtgctgagggcgatggtctcatgatgcagattttaagcagaggtgagagagggagagattagcatttcagaaagcatggcctctgccataggaagacaagatcagagggaggtccaagctggtggccagtggtgacggggcctgagctggaggagacagggatgcactggagacccaagagagaagtccctgaacgcggtgcacgaagagcctctggggttacaggaaggaaggggtaaaatgttcttttctgtgtccagcttaggccactgaatagattcggtgctgtgtgttgtactaggaaatgcggaggtgatggggattgtttgggctggagtctggaggggctgtgccccaccccaagctgggtgagcatctaaggtaagtgagggctgtgcccaagactgcatgagcaaatccaggttctcctaccagcaagctgccttgaagactctgaggctggaaatgtataaccttgtccgtaccactgagcacctgttacccatacacattactgttctccaaaccacggaacaacttgaaggattgttttgccagactaaaaagtgaagaaagcactggtttccttccatggtgttcctctttaaaccacaccttctcaaccttgtttagggagtggggatggccttcaggagctccagaggccccccctgcccgagtctgactcctggtttctggcttcaacaatgactaacctgtaacttcacattttggtctataaagtgggtagaaatgtagcacctctgcattctccaggtttgttgtgaggacgaaggagataatgaatgtagaatttttttttttgagacggagtctcgctctgtcgcctaggctggagtgcagtggcgcgatctcgcctcactgcaacctccgcctctggggttcaagcgattctcctgcctcagcctcccaagtagctgggcctgcaggggcactcccagctaatttttatattttcagtacagacggggtttcaccatgttggccaggatggtctcaatctcttgatctcgtgatccacctgccttggcctcccaaagtgctgggattacaggcgtgagccaccgctcccggccatgaatgtagaattctgagcccagggctggctcactgggagtgggccacacatttagggggttgttgttgtacacatgatcatcggtggcactgctttgcagcctaatggtttttgacacatgtgttccttcttaatccttaagccagcaccttgagttgggtgtgatcaactcattgaattttttaacttcagctgtgacattatagatcatctagctctgctgtgaccttattttgtagatgacagggctaggggttaccatccctcttaaggcctagggcctgggtgttctcacacccaggttgcggtttttgtccttgtcttctggaggttcgtctgcattttatttttttttgttgacgatttgttgacgaggctggagtgcgggggtgctatctcggctcactgcagcctctgcctcctgggttcaagtgattctgctgtctcagcctcccgagtagctgggattacaggggcacaccactgcacctggctaatttttgtatttttagtagagacggggtttcaccgtgttggccaggctggtctcaaacacctgacctcaggtgatcgcccacctcggcctcccaaagtgctgggattacaggcatgagcctccatgcctggcctcatctgcattttagggtccctgttttacaaaggagcagtccctattttacttgcagatgggcagtagtgtcagatcctcactggggtggtcagggaagaggaggtgtttggaagagggccccaatggacctctggcctgcgggattgagatcgggctggccagctctcctctctttcctcaacagagtctgggtctcaccctgcccagcagctttctcttcttcctagaagtgcccaagacaggatcttttcagttctgagatcttccacccctcgcacggcagccttcctgcccctgcccaggctgacttcacaccatgctctgttatcccaggtcctaggctcgcatcggccacttgccaccatgttggtgactgcctgccctctaccttggatggtgcggtccacggggcaggactggggtttgccatttgtgtgtccctggtgcttctctcagtgtctgacacctggtgagatttgccacctgtttggtgcatgggtgagtgtggttgtttacactagcgttgttattggaaatcactcaattcttgttctcacccactcctgcctcctctgagaaaaagtgtggcagaaaagttccctgaactactaacacagggggatttagcactcttagatatttttaacttttccatagaaaggcagcaccccccacccccctccaccctttttttgaagcagcagcatttacaaatattgaaaccaactttgtacatctccactctgacttctgggcctatttaataaatattcactcaaacatgtactatgtgtcaggcatgatttttggcacttgggaaacatcagggaatgatgtttggggaggaagctgatctagctggggcccaggtggggttggaatggaggaatggagtcctgccctaaatccagcatggcctttgtcctgcgtgccttgggacctggtcctggtggttccctccacttctctgattcttggtttgaatatatattgactgaagagttggaatagaaatatcttcgtattctgttttcagttctaggatcgtttattcgtccagtaacgtttgtcaggggttgaatgtcgagtggagaatggctgaatttgcactgtgagggaactcacagctggagggagatccccacagggactgcgaaggcttattgcagatgaaggagtgccatgacgacgatgacccccaggagcgtccttccaggacaagcagatgggttcagggaaggctgggcaaagaggggcaagtcagccatgcctggagaggagcagcatctgctgggagtcctgttttgacagttgtcattcccagatgttcggtggtgtgttccctgcagcaggcctgcatgcacctggatgtcagagtgggaggccattagctcactggttcagaaatagttcctggttatgcctgtcttgtggtggcccattctcagcttggcggatacagcagcgaccaaccgaagccaccagtgggagcagaactggaggatggaggtcctcggaagggttctagccacactgggcttcagaccctccagagtcaaagcctggcttccttctcctgctggaggcaaaggcccttattgtttttttgtggctgcagtaacaaatttcgacagatttggtagcttaaaacaacagaaatttattgtcttacagttctggaggccagaagtctgaaatcaaggtgtcagcgaggttgacaccctctgaggtgctaagggacaccctttccttgcctcttccagctgcttgtggcactggatgttgctcggcttgtggcagaatcattccaatctctgctcttgtctccacgtaccttctctatgtccgtctctcctcatgttttagggcctccaatgatctcatctcaagattattatttttaaacaactttatttaattttattattattttattgatttattttaagaatggggttttaccatgttccccttgcagctctcctactcttgagctcaagccattgtactgcctcagcctcccacagcatgggattacaggcgtgagcccccactcctatccaagattcttaacttcattacatcagcaaaagcccttttcccaaataaggtcataggcaccagattctaagggcaatatcttttttcggtgggtgaagacagcattcaacccacactagtaggccccagcacttctggggaaagccaaggtttagacctcatatccagatgctcttttctgtggttttgtcactttttcttatcttatatgagaaatatatacatattttaaaaaggtaattaaaattttgttgatataatttcactttcacattgagtaaaagctgcaagaagagtacaaagaactccctcatatactttacccaagttcaccaatgaaaaaatgttgccccctaagtgggtataatgtacacattttctcacagccagttggcagattcatcagagcctcaggctccccctacccctcacagcgtcagacagagagtttaccatggggctggacagttatgattggtttctcaggcagctgctcactctaaggcttgctgtaggctctggcgttacatctgtcactgggaatgtggcatcgtcctggcacagtcacagagaggccaaagacacagctctgttcaccccccatttaaagccaaatggccatcctgggtcctgggggacccttccttgttctctccactctgcccttggatgtgtcagttgcaggcacttcagatgcagtagagttatttagagaaggcggctccctgcaccgcctgctgccttttggtccattttgagctgggtgtccgagcctctgccctacatctaggaactaacagagtcaggtgttgggtgcagaacagagattggcaggagatgagcaggctgttcagagtccgccaggagctctgtgcttgaagctctgaagagcttccatcctaccttcctgatgatgcagactttaggtgagggggagaggcaaggaggttacaggatttaccttttggaaagactactttgatatgaatgcagaatcagggatggaaaaccagtgaaagagaatgtcacaataaatagtataattgaaagtccagttttagaggttttgccagaggcacatggagggggtagcttgcttggtttgcattaaattaaattgcattacttagagtccctataaatgctggtggatcaatgtagctgatggtttcataacaaaacaagaatgataataacagcgtctaagagaatgcaaacgttaatagtacagtgttgtttttgatcctgccactgtatggtattgaatttacctgggttatggagtctcataattgtaccaaaagctgtggaaagagtcagggagagtatttttgcccccattgtggggatgaggaagctagaggtgacctgaattgctgaggttcatgcacctagtaagtaacagagctgcacttggaccctgagtcttagaaaaaaccccacactagttcttttgctgatttctgagctatgcccatttctctcactatggaattgttttccactatacctctaggaagctaaactgggacataactggggcacaagatgggggatggagcttgcccctcttctcagcagccagataaggccttgggagcagtgaagagctttctgtaacctgaactgcctgacatccttgcccttagccacgtggggctgttgaacacttgacctggggctgtagcagctgagggactgcaatttttgtgtgaattaatttcaacagacttaaatttaaatagccctccctatgtagccagtggccaccccattggacagcatatgtcagcgctgtaaaagtcaagtgtgagccacaatgggacataggaaggacttttcaggaaaccatttgactgttgggattctcctttcatcttttaggggtatggtggggagtacctgctgacggggatattagaatgcctttctttttttcttcccttgatgtgccgagactccatgccccctgtcacgggtatcccagagctatggctagtgggtttgctggctgagatgggtcctgagccctaggcccctttgccccagaaaggaaaatcccgaggaggcagctgatgctagccctggaagactttaattcgagggtggcacacctgacaacgccttgggtaatgagtgtttgtttctggaggctcatgggacacccaccccagggctgattgcaggttggatgctgtttggtgagaatggatgcatacccacccgctgatgacaaagggacaggtcagaaggacagggcctttctttgaatggaaaacctgacccgggatctctcctggaagatgaagaatgaactgggcagtgaagtggggagaaggagaggttaacttctggggggcttagagaagaggggggaaggaggagaggagcctgggattagtcccacgaaggctgcgctcttgtttgcccaagtctcctcctgtgtgggacacaaagtgggcttgtaatacaatactggctcaaaggaagaaaaacggcagaggctagcactggggccaccctgagcaagtggtgtgttcatctgtgcatgttctggacagtaccacgaggtcagtaaatgcttctgcctggcatctaccacaaagctcattccagagggtgctctgtggccctgccaagaataaggcctcgtcaggaaaggctcaccctgtattttcccagcctactttgagccatctcctgaataaaggacagcttgcctgggcagtaccgctcctgccacaaagacggaaaggaaaagtatggcaagtgctttaagactccttttaatgtcagctttctacatccagataaggagaagagctcacgatggtcctgtaacttgccagacatctcacaggagattcattgctgagtctctgagcacacacaggctccctttacagactggaaaagtctttctggtcagtttgcctccactgacatttattgagcgcctgtagtatgtgcttggatgctgccttgagagggcgctttgggtttgaaggctccggaaacgtatgactttggagcactcattcctattcggtgctgacctttgttcacatttgtgctcagccaacaatcctgtgtaggagagtggagcctgacaaatgtttatggaaggtctgcctggctgactccatacacagattgcatagggttttccaaatggcagctggggagaagttctggatctgtcagaactgattgggagaacctgcaaaacaggcaggggtgtatacgtcccttttccaaagtgaccctcctgcctggcttttgggaacaggatctgtcctcgatggtccctcactaactgcctggcttcctaactgttgcaggtctggggatgtctgttgttaagacaccatgcatctggatgcctgttgagtgtagagtgctggctcagctgtagggtggggtgggatggggggtggtttgaaacctctttcaaaaataccattagggagacaccaagacagcactgacgtggatgcagaacgtaagtgctcttggagatgaggtcagcacatgaagcttctctgattttacagttgccaccagggacgcaggattatgttcctgttaactgaagacacaatgagaggcctggcttaggcaaaagctggccagtagggtgtatcagggaggccctaaaagggttagtacagtgggtgaattgtatcccctaaatagatatgttcaggtcctaacccctgtgcccttgaacgtgaccttagttggaaggatctttgagggcgtaataaagttatggtgaggtcatcttggggtatggtgagctcttaatccaatgaaggatgtttttctaagagaaaggacacgtggatacagacacactctgggaggaaggccatgtgatgatggaggtggagattagagggatacagcaccaagtcaagggaggccatggattcctggcagccaccagaagccaggagaggcaaggaagggtttcccctcagaggcttcacagacagcacggccctgctgtccccttgattttggacttgcagcctccagaacagtgagagaaaacatttctgttgtttcaagccacctattttgcgaccatttgtaccctgagaatctaatacagaagggaatctcatcctatcttgaggtgatggctttcctagactccatttagagcaaggaattgcatgtttataagcgaactttgacacttgcctctgctgatatggctgggaatcctctctttcattcttcattattaatgggtatttattatgtcataggacttgtcattaaatctgctgaaatctggtaatccaagcctccaacccatagtttgcatcaaccaggtggcgacccccaggctctgctggtttccattcctttatcttgattccattcctttatcttgattctccctggccgagagcttttctgacccacctaaaatctgttcatttcagaccccggcctttccaggatgccttttggagcccctgctggccaccacatatcatgttctgaagttctacagccctctgagttggacactgaccatctgggggctcgagtcatcctcagattggtatgcagccattcaaacattcctgtttgtttcctgtgagtcagcattgtgctgggcttccaaggaatctgcagtcctcttcactgcctcttcctgagtactcactgtgttccaggcttctctcagcccttcctgggtacagtgctaggaagtaaagagtcatatccactccagtaaatgattgctgagtggatgaatatagctattttcaccaccaagataaagatgggaaagtgagactcagaaataagaaacttgcctaaggtctacacagtttaccagtgcaagtgctgggattgaaccctggcctgtctgacatagaggccactattggcccaggacaaaagcttgtctgcagaggacagagcaggagcagcgctgtccatccagtctgggcgatattctttgcagtgggcccaggggtgataggaacttgttgcatggatgaagtggaacttttcttcccagaaaagaagacaagaagacagggctctgacacccatggtctccagcagccctttttgcctggagcaagtatgcccaacccccctttggctcttgaataagaaggaaaggccttaccatatgagcaggaattgtgcatccaggcatgtggcttactcacctttcctgctatgcctaaccttctcttctcctttctctgtctcctcagaccctcagggggcacacatttcagcataagctacagagttttgtccgcattcacattcctctccatctgccatgatttgttttttttttttttttttttttttttgagatagagtcttactctgtcacccaggctggagtgcagtggcgcaatctcagctcactgcaagctctgcctcccaggctcacgccattcacctgcctcagcctcccgagtagctgggactacaggcgcccgccaccatgcctggctaattttttttgtatttttaatagagatagggtttcaccgtgttagccaggatggtcttgatcttctggcctcgtgatccgcccgcctcggcctcccaaaatgctgggattacaggcatgagcaaccacgcccagccgacttgtttttttactagccgtcaatctccaaccctctgtcacagcctaacaggtgccagggggaagacttaggactggggtctcatcgttggttatgggcactttagggttaaataaagctatgtaagacacctccccaaaaaataaaaacaaaaactaaagaccaccaaagaaagtaggaaacctcaaaaaactgagaatcactattaccttaaagcccaagtgctctaggaggaggcaaaagaaaatgaaaacagagcaggttatgactcagctaactgatgtcatggctgttacatgtcccatctcatgtcatctaaatcaggggccagcaaactgacaggctatcagtttttgtaaataaaattgtattggcacatagccatgtcaattcttctatgtgctatcagtgctgcttaggtaccattataacagcagagtctggtcctgacagagaccctgtggcctgcaaaaagcctaaaatagtttctgtctaacccttaaagaaaaagattgccagccccggttctaaactgcacttctgatttctaactagtcggagctatttttttatggagggcagacagtttctcatttgctctgcatagcaggccttggcagccgagggccagggaggagcttgcccagatcatgcagccagtccctacacagctggcattcacctccaggtctgcctgaccctgaagcctgcaccctgatcccctgctcctctgcctccatcccctgctgggcctctgcaggagacggtccaggcccacactgcttagagaggtttccaagagtacatgatctgttagggattgtttgtgacagttagctttcaggtgagagctcttgagaagaccgcctatatctcttcccatgcaatagctccagccccctgccctgcactggcatagagcaggggcccaataatattttttgattaaaggaaggaatcaatgaagagggcagccctcaagccagggcactgcagtgtagcatagagcagcccagcctctggaacccatgccaggccacgagttccagtctgctatgaccttggacaaggtagactacctctctgggcctcgcttttctcatccgtaaaatggggataaggacagcatcaaccccaaatgcccactgtgaggttacaggagctactgcaggttgtgtgcatggaacattcttagcatatctgtcaccaccgggacagaaacgggctgttattatcgaggcttcaggctgtttactgaggattctttagaaatggagaaaggaagagtagaatgctggtcttcggacagtccggccaagtgagactgtcaggcagatgactgtggtgaagatggcccagcaagcccctcctctactcagatcgcccttggaaaagccagtctgagaattgctgtcctggtctcttcactggggctgggaaaggcaaggcatctggcctcagcctccctggacacctgctcctgaggagcctgcagattcctcaggaactactgctgcactccagtgttgggatggcagcagcaagaccttcaagctgcatgctggggcgaagttctgccccaggggcttgtgttcaccccaagactgtcagtgcgccacccatattggtcaggtgcttcccagtggcctccgtggggcaggccactccagccggccagctttcttgctttgcagaaagtcactgggctgagcagcaggcagggagttggggagccccttgccatttatttgctggtcactcacagggtgttcgatggtttcaattggagctgttgaactgtggcctaagtcaattatcactgggttgctcctgcttgagttagatgtgccccaacccagtggcacagtggaatcagctttaaaaatagctgtgcgttgggagaccgaggtggtcggatcacaaggtcaggagttcaagaccagcctgaccaacatggtgcaaccctgtctctactaaaaatacaaaatattagctgggtgtggtggcaggcacctgtaatcccagctactcaagaggctaaggcaggaggatcacttgaacccaggaggcagaggttgcagtaagccgagatcccgctattgcactctaccctgggcaacagtgcaagactctgtctcaaaaaaaataataataaataaatagaaatagctttgccagggttccgctcccagagaagctgatgacataattgctctgggaaggactggggcatctgtgcttcttgaagctcccaggtgatcctaatgtcagccaagtttgagctgtatattaaaaaaaatttttgattaaaacaaatttttagagagagagtctcattctgtcacacaggttggagtgcagtgatgtaatcatagctcactataacctcgaactactggcttcaagcaatcctcccgagtagctaggactacaggttcatgccacaatgtccagttaagtttttatatatgtatatattttttgtagagatggagttttgctatgttgcccaggctggtcttgaactccaagcaatcctcctgccttgacctcccaaagtgccaggattacaggtgtgggccaccatgcctggctgttcagctgcatttagtcatttacctgtgtgccctcccttgccatgtgtgcacacctggtacctgaagacctgggagacgaatcaatgacaggggtacataggaaataagaataatggagagagccaccagttagtgagccgcgactactgccaggagctacactaagtactcaccatgctgctaggaggaaagttctgaaatgtccccattttatggatgtgaatactgaggtcatgggggtaaaataacatgcccaaaggcacagagctggtactgttggagtcagaactagacttaggtcccctgtgattccaaagtgctacctttgccttggccacccctgcttggactttcagtgaggacaactgtgtgttgggattgtggtccacactggaaatcccaactaggtcccacctgatggaaaactaaagttcctcattacttctagtgccagtgtagaagctgacccaagttgcctttttgaaaaaaaaaaaaagaaggccaaacacggtggctcacacctgtaatcccagcactttgggagtctgaggtgggtggatcaacgaggtcaggagatcgagaccatcctggctaacatggtgaaaccccatctctactaaaaatacaaaaaaattagccgggcgtggtggtggatgcctgtagtcccagctactcgggaggctgaggcaggagaatggcgtgaacccgggaggaggagcttgcagtgagccgagatcgcaccactgcactccagcctggggacagagcgagactccgtctcagaaaaaaaaaaaaagaagacatagtttaggaaattcagtatttatttcttggcctctcagcagggctttatattttcgaagggtgggcacttaaattacacagattgggtttttctgttcctctttgaacactgggctgtgtgaggaggaggaggaagaagactgaatcttacagagctgagatgatcagatactgccggatgtgccatggggcctggagagctgacgttgctaatatatcaccccattggtgcctacagtttccattctctgattagagatcatatttctttgacttgatgctcaaatgcctctgagtttgatcctttctcatatcctgaattctatttccagttccccagagttttatcctaattttatccattattgaagttttcccaaaaaaagtcagcatcatcatcatcatcatcatcattattattaatttttcttttgagatggagtctcactctcacccaggctggagggcagtggcacaatcttgattcactgcaacctctttctctcgggttcaagcaattcacctgcttcagccacctgagtagctgggactacaggtgcgcactgctacacggctctaacttttgtattttttagtagagatggggttttaccgtgttggccaggctagtctcaaattcatgacctcaaatgatccacctgcctcggcctcccaaagtgctgggattacaggtgcgagccactgcacccagcccatcatcattattgatgtcatttattacacagcattgtatttccaaagaatagatacgggtgagaaaacaaaatcagtaactcttccttgactaatcagattgttttcagatatctgatatgttttgtctttacattaattaatgattttatatagtcataggtgtagggaatagtttgtagtcacttttttttaatcctaaagcggaaacatttttattataatatatcctaaacatttgatgtaccctaaatattttttcattttattaaagcagcttacaaatgatcatttttagagagtatataatgcttcatcaagtggacaagtcatattctaaatcagttctctgttgttaaaaattaaagtgcctagtagtttgccgttacacttctaagggtgccatgagcatcttcgtgcatataacctttttcttcttggaaaatcttttggacagattctcagcaggattattgagtcaaagggcacagttttatgactcttgtcccacattgccaaattactttcaaataaggttgtttatgctgcttccatcaacatgtggacatgccagtttcaccacaacctcatcaacactgggtattattagcttaaaaaaattatcattcaatggatgcagaatgatctcttgttagatttatatatttttttatccttagtgaggccaattttcttttttgcctctgtgtgtttaccaactctctttgggaatgctgacattggctgctcctccagccaagttcgttactttccatgtggatgccttcaagttgagccagttgcaacgcagccttgacttaaaatgagcgagcttcaacattgagcctttgtatgaaattcagcttagcacactggcccctgagtttgaaggctgagattgcaacaccctgctcttcacgtcgtggggttctgcatgaaatcactgaactggccttatggtctttatgacttcaaacttaacagttgtccccctagatttgtcttatgagctaggcagggtttttcttcagaaagctttgagatacagctccttcaactatttttcggtttcctagcttgaaaaacgaagagaagaaaagtccctgtgtgttcatgttgtctctttatttgtggggctgttgtgtttctagatggttttttctggttttctcttgctgcttcactcaccacatcctgtggagctggaggcttctctagccctgtttgtctctgcctgtctgacattgagtgcctggagccctccctagctctccagctggaaccttcctctgtaggaaggctgaggctagcagggagaagccaggatggattttaaagagccttgttgtctctaaggaagagtggagcttacatctttgggtttgcagaaatgcccacattcaactcagggggaataaaaggatgggagttagaatttcaacttgcagttgcagaatctcagagttaaaagaaacctcagaggtcatctcttccaacccttctccagagcagctttaattgcctgtgtgggagattcagggccagcagctgcagcttccctttccctgcctctgacttgccaggtgagtttagatgagttccttgctttcttgagtgtttattattattactaataaacaagaggatgaatatttgaagttcttctgctgtcttaaagccctcaaactccactggctactgaaatcttatatgcaagctttatacctgtaacttgttaaaggagagctgctttgataaaaatagggttatagtcctcctgctgaacctcccatctccacctggcccccagaagtcactcaggaggctctcttgaccccctagggatttgtggagtacagttggaaagggtggcactgtgacctatggttataataacaccggcacctacttattgaacattaaccaggcatcaggggcttggcacaggtcatgttcagttctgacagacactttgggggctctgtatccttatccccatatcatatatcaggtctgagcctcagggaggtgctcgttgctctgccacacagaggtcacacaggaaggaagtggtggagactcagttccagcccaggtagctcagcagcaaggcctgtctgcttcagctctgagctttactgcctctttgtgacttgtgaccttcaacctgacacacagcatcccagccttccctggagtttggttttttgagttgtcatcccacctgccatctctgacagccccagtatttagtgttttaggtgctcccagatccacgatgtgtagtaataggctaaaggcatcagtgttctctagaatacttcgtaccacttagcaaatagcctctgtgacgccactggttttgtgattttcccaagcaaactttactatccctttcttattgtcctcatcacttactcttgtttgcacaaagcccaggctctaatttattccccttgtccttaatcctctcatctctttctccaggtatcaccctcagaaataaggatgtgcagtaggtctggtgggcatctgaatgaggatggcccccagggtgtgtacatttcctggggggaaactgaagctggagtctgggcttctcaagtgtgggttctgcccctgaagctgttttctcacaatggaggctccaggtacttcctaagcccccatctgctgcaggagatacctgaagaaactgtggacagttcaaaggttggattatttaagaaatcttggctgggcatggtggttcacacctgtaatcccagcacttttgggaggctgaggtgggcggatcacttgagatcaggagttcgagaccagcctggccaacatggtgaaaccccatctctactaaaaatacaaaaaagttagcctggcatggtggcacatgcctgtaaccccagctactcgggaggctgaggctggagaatttcttggacccaggaggtggaggtttcagtgagccgagatcatgcctccacactccagcctcggcaacgaagccagactctgtgtcaaaaaaaagataccttgtatcagttctgacacttgcattactagctgtcacccaacaccttagttccataagcttgaaggcttcttatcactataggattaagtctgtaaaccgcagttgtaagttcggtgccttctgtcaactgttcatctcccctggttgcaggcatgttctcacccacgtccgtggtgatgggtgttaggtgacagcatgcttccccatgcattgctgggctatcctagtgacagtgttatatttaccccagcatctgatgagcagagcagagtcagggcttatgtgctaatgtcttgttgctcttctcttctcttgcatgcttacttccacactgtcacttctttcaagctgctgatcacaagttacgtcttacaggaagttctccatgagtagcttacttctctttctctttttttttaagagatagggtcttgctctgtcacccaggctggagtgcagtggtgcaatcatagtttactgcagcctcaaattcctgggctcaagcaatccttctgcctcagcctccctgagtagctgggattataggtgtgtaccaccatacctggctaatttaaaaaaaaatttttttttgtagagacagtatctcactatgttgcccaggctgatctcaaattcctggcttcaagtggtcctcctgctttggcctcccaatgcacattcctgagccaccacatccagccttagttgtcatgtttttgtttattattattatttattattattattattaaacggagtctcgctctgttgcccaggctggagtgcagaggcggcacaatttcggctcactacaacttctgcctcctgggttccagtgattctcctgcctcagcctcttgagtagctgggattacaggcacgtgccaccacacctggctaatttttttgtggttttagtagagatgaggtttcaccatattgtccaggctggtctagaactcgtgaaaacaggtgatttgccctccttagcctcccaaagtgctgggattacaggtgtgaatcaccgcacccggaccattattattataattttttttggagacaaggttttgctttgttgcctaggctggaatgcagtggcagaaacataactcagtgtattcttgaactcctagacttaagctgccttgctaatgtatttacgtgtgtgtctgtgtttgtaggtctcactatgttgcccaggctgatctcaaactcctggcctcaagtgacccttccgccttggcggttgccatttttagcattattgttatttggacattgtgattaatactttacacaaatgacacaatttaacctgtaccaaataatcatctttcatttattgtctaacaataaactcaaccaaatgtgtaagttcatctatctatttgtccatctggtcatcatctaatcacccaacagaagttttaccaaactccttttttatattaggtgctaggtgaacaaagttgaagaaaatgggtctctaactcaatgagctgggattcatccacgcattcaaacgatcacaagtgtttgcacactgctcactacccttgcttgttgatgccagccttgagtccaggctttccatccttgtcagcaaggtgttcccacaaagtagctcccatttgctatgatatgtttgcccttctggtcctggaaccttcatcttggtgacacaaggcctgagcatctgtcatataaacctttgcgatgcaggctgtgttctctaggaaacagacgctaagatgtagattagcaagtaggatgtttattatgggattcctttgggatcaacagctgtgaaactgaaggagaagaaaccatagttgggcagagggagaagtggagctgtaacaatgtcccaacaaaggccaatgccagaggagcctgggagctagactgatccttcagaattgtcctgaattgaggtgagggttgatcagtcatttcatgtgcccccgaccccaccacccaaaggatgcctaatcttgaacaaggtgattgtattcggccaaggcagttcccagagagggctgatagctgatggtcatctgccagcactttagtaactgctttagaagaagcctggatggagaaacatctgctttgtttttttgttgtggtggtggtttgttttcagtgaaagggtcttgctctgtcacccaggttggagtgtattggcatgatcatagcccactacagccttgatctcctgggctcaggcgatccttccacctcagcctcccaagtagttagacctacaggtccataccacagcatccggctaatttttaaaatatttttgtagagatggggtctcactgtgctccccaggctggtcttgagctcctggcattaagcgatcttcctgcctcgacctcctgaagcgctgggattataggtgtgaaccactgtgcctggccaaatatctgctttgcttaccattttatccccagtatctagtacataaaagcacacagtattggggggaatggaattacctaagctttacggaagcactgtgagtaattcatttagcaaatatgtatatctattatgttcctatgacatgtcagtcacgattactacccttacggaggttatagtctagggggtttgggctgagcggtggctcaacactgacttcctggaagaggcaacctgcatactgggggcgtgacttcctggacgatgggctctgggccagcgttgggctcagtgtttcctgggttccctagaaggtggcttattgagctggagacttgaatggatatgggatgttttctcagggagggggctctctgttgcagcccacctctgggcgcacctgtccaccataggaaattccctgcttcacttaccttcattgacgtttgaactcccaggagcctggaacttccccaggtgccccattggcttggtgactttacatcattacatcagttgagtaattgaagaatggaggaaccattcttttgagctaagtggaaaaatatattttctcctctgtgagtcaccaaaaactacagcttcttttttttttttttttttttgtttgagacagagtctcgctctgttgcccaggatatagtgcagtggtgcaatcttggttcactgcaattttcaccccctgggttcaagtgattccttgcctcagcctcttgagtaggtgggattacgggcatccaccacaacacccagctaatttttgtatttttagtagagatggggtttcaccatgttggccaggctggtcttgaacttcagacctcaagagatccactgccttgtcctctcaaagtgctgggattatagacgtgagctaccgcgcccaggcttagagcccagcttatacccagttacttagcttctgtgtgtgtgtgtgtttgtaaatgaactattatatttcaggaagttcctagcagggaggatgagatggaatcagtgaattttagatctcaaggagaactagagattgcttggtccaacctctttcctctgcaagagggcccttgtggggaagggactggccaaggctacccaaagagcttggagagaggtgcagggcatgtgaccatgtgcaaagcatttgccagtagagttcggcattttttcctggcgcgttcacctcctgacagggcaccaggaaggtgctgcacagcctggcatgtggtgggtggtgtttatctgcacaagtcacccaagtgatcagaacgcttttacggaaaacaatggctttgatgttctgggtgacaagaccaaagcatgctggcgggaagggaggtttttggggttagagaaatgaaaactatttacatttagggctgacttaataacttaacacctctgaagtgggaggatgtttttgagggaaagttgaatgtaagtgtagtacaaaaaggaaagtttgaggtagaagactaggagtggaaatacttctaatggctcagggaaaacgtcctggtaaggttgaacttccagatgcctcctttcttcccacacccccactgcatcctctgtttctacggtgagatttgcatggcactttacagtttccaaagcatttcctcacatattatcttcttcagtcctcccaggaggtggtgccaccaaaggctgtctgaccacacctgcggcttttggagggagcttggcttggaacccagggttctctgagtcaaaatccttttttcctgggacagtggtggtcctcacattcccttcaagactatagactttagaagcccagtctctggcgctagacttccttccttcacctaccaggcttctccctctgcagaggtcttgggcgccttttgtgaccattctgtgacgtggtttcttgaaatgtaagatggggataatgtgagcacctacccaccttcttgggttgttgtagggatgaaaacatcttcacagttcctggcacctattggagttggataacgatgttaggattacttgaggctggctttcctaccttgttttaacagcagctctagagtttcagaaacataaggactggacttttggtgatcaaatctaaacactctccagtaaaatcagtgatgctgctgactctgagtctttaatcattctagtctcttcaccctctgaaaacaagaggatgtgtagcatagtgagcaacagctgtgtgccggggactcagcattaagtagcatgggattactcatgacttcgcactcatggcagcctcacaggtaactttgtcaatttctttttttccttttatattaaaaaaacaaaatggctgggttcagtggctcatgcctgtgatctcagcactttgggaggcaggggagggaggatggcttgagctcaagagttccagaccagcctgggcaacacagtgagactctgcctctacaaaaataattaattaattaattaattaattaataaaataaatgaatcaattaaaagaattaagaaaaacaaaacaaaactttttgaatcagtaaagcatttacaagacacaaaatccaaaaggtatacaaagttttccaatgaagactgccaaccctcatgtccccagacccctgtttctcctccctgggacacagttgttgcaggtttcttgctccttcttcctgaaagagtctgtgcattattgaaaagaagatgtgtgtccatgagtacatctacagacgagtgttgagcacctgttgtgcacagtggtgggggcagtgtgatgggagtacacagggcagggagacacgggtctgggctcccctgaagtttgcagccgtattaagggctcggccttacagtgcgtggggcctcggcttcagaggaagggctgatcttggggctggctgctgcttgacttggagtacctgcctccctctggcctcctgttgaggcagcctggggtcaaatcccagctcacctatgtgccaggctgctggatggctcggatgtggcctaattatttcctgatggccctgccagcctggccatgggctgtaggaacagtagtagccatccatttttctttcttcttcttggacggaggtggtggttcaaatgaaatttcagccttaccctttgtagttttctacgtaataaatcctaacatctgtgattaaggtgacataggtttttttgagaaaggctttgatttcttgcttgcatggatggttaatactccaggctcttcagggtgattctcgccctcttgttctgtagcttgtggtccttatttattttaatataatttaaaacttgcagaaaaaaattatgaacatatgaagaactactgcacacccagatcatcagttgttaactcacactccaccccaccaccaaatacgctattttttcctgatccatttgagtaagttgtagacatgccctttcatccctaaatattcagtgtgtgctccccaaggataacgacattcttttacataacgactgtataattatcaaactcaggaaatttagcattgctgcaattgtattatccaatcctcaggccacacacaatttgatcagtagtcccaataatgtcccttttgactattttttcccaattatggatcattattgcatttagtggctgtgtctcatgttccccagtcatacttgactttgattttttttttttttttttttgatatagagtctcactctgtggtccaggctgaagtacagtggcatgatcccaggtcactgcaacccccacctcccgggttcaagtgatcctcctgcctcagcctcccgagtagctggtattacaggcgtgtgccacaaagcctggctaagttttgtatttttagtagagacggggtttcaccatgttggccaggttggtctcgaactcctgacctcaagtgatccactcactttggcctttcaacgtgctgggattacaggcgagagtcaccgcacccggacgactctgacatttttgaagagtccaggtaagttgttttatagaaacactcctcagtttgggttgagactgttatttttgaaagctcatactgcaccacttgctttaattctgtaatcctcaatggtcccctatggctgctgatcacgtccgcgtctctgtagataagaaaacggagccatcgggaagtagagtggtttgtcaatagtcacattcccagcaagtggcagagctaggattcaaatccagactatctgtcctgaaacctaatttgcctaccaggcaacaggaataaggacaacaattagaccctgagaataacaaagtgtttatcaagcacccactctgagccagaggttgtgttgagcactctgcagacactgcagtacaatactcccatccatcccaccccagtccaggagcagctgttttatgttgttgttgttttgagacagagttttgctctgtcgcccaggctggagtgctgtggtacaatctcagctcactgcaacctctgcctcccaggttcaaacaattctcctgcctcagccacccaagcagttgggattacaggcatacgccaccatgcccagctaatttttgtatttttagtggagacaggggtctcgccatgttggccaggctggtttctttcttttcttttctttctttctttctttctttctttctttctttctttctttctttctttctttctttctttctttctttctttctttctttctctttctctttctttctttctttccccttccttccttccttcctccctccttccttcctttctttctttctctttccttccttccttccttccttccttccttccttccttcctttccttctttttttttttgacagattctcactctgtcgccgaggctggagtgtagtggcgtgatctcggctcactgtaacctctgctgcctagcttcaagtgattctcctgcctcaactccccgagtagctgggattacaggtgcctgccactgcccctggctaatttttgtagttttagcagagacagggtttcaccatcttggccaggctggttttgaactcctgacctcatgatcctcccctctcggcctcccaaagtgttgggattacaggcgtgagccaccgcgcccagccttccaggctggtttcaatcttctggcctcaaacgatcttcctgcctaagcctcccaaagagctgggattacaggtgtgagccactgtgcccggctgagtagctgctttttttttttttttaatcctcgatttacagatgaagaccagagaagctaggctgacttcccatgttgacacagcaactaactggtggggatcagctcagagctgggcagactatgcacttcccaccctgccctgcaccccatgctcggcttgctggatttgatagaatctagcaagcgtgggggccaggctctgctgactccctgtgagaagcagtgtctgtttctgtgtccttttctggggccttctccagagggaaggaacatatcccaaagctggagcttgcactcaggagcttcccaggggaaactgctccactctctgccatctacagctcttgcaggtaccatagtctacctccatgatctatttgcagtgggcgatggtgttttgatgatttccacatcatgaacccaagtgctgttgctgatttcgaagcttgttcactgtctcctgccaagtggccaagggctcctaccctagcccttggtggctgctcctggctgccatctgcccacccagttggccccactgcctgggccacgttctggtggcatccaagaactggtagcagagatggtgattagtcaatgtgtgttataccctgggtctctccatctttccaacagagacctgccttacatgtaggactgcctccccttgttcaggttacctagcccttgtgcaattcaccttctgattggagaaggaagacaatacggccctgcctctcggcctgtagagaggaatggatgatgtgaaactgtggcatgcttgatattctgctggcagagaggagaacagatgttaacacagagcacacctctgccccgaacctcctgggagccttggaggtcctgagtcagcctgtccttggcactcaggctcttcagacgtcaaagcacagcgttgggcccagcatgaccttctgcggtcccaggagacatcagggaagtgttgtcagtgtccttagaaagcccatggcttgctcggccacatcaggtgcagggacctcagtcaaccacacagcaggtagatatccttgagaactgtgtcaggtgggaggatagccagagggtctgggggcagccacctgacccttcagtcccaggatctagcacctcccatcagaccttcctcttcactccctgtttctcccaccaattattggcattggcatatttctgagcaagttctctccttgtggcctgtcactctgtgggtgggaagtgaccccctgctgagcaggttcagtgttttgaggtggggctatgaccttctgctttgcaccgggctctaaacaccctggcctgcccaggattctttgcagctcctgggagaagcttagaaattttaatttccttaatttccatggaacattgctttgtgtgtgtggctaaaaacattaattaaaaacattaatcagtttggctgccttggaaagaggttcttttttctgcaggagccaacgtgctgggttattgcaaccccatctccccagccccttacaaggaggaggggacaggacatcagcttgcaaaccaacacttcagccctgtatttgtggatttgtctcttggtgtcaggcagactccttagctcctctgaactttagtttccacatctgtaaaatgggaagaaaggttatgtgtctcctgatttcttggggactctgtgtgtgttcagtgaggtgccaggaggacagtccttagtgaaatgtcctctacagaatttgctagtaaaggcgctgttgttataattagctggatttccctggtagtttacagactgcctcttctgcgcactgtctcatttaatcctgtcagcgcacctggcagacgggtagtgtttgaatccactctttttcacagatgagtacactggaaagggagggttacagccaggcctggagctgagaacctttgatggaagccccaggctttggcccaatctcattgccttcatttgctcccttggccccatgtgctgagtccctacactaagttacagtggtgagatagaaagaggggaggccttttcatttcctcctgggaggagaggaagaagttaagtctctagcatttgcctaagtagtgctaataaaagctgacatttctatgggcttataatatccagagacaagtgctaaactctgcaaagattctcacttaacaccaggaacaagcctctaagatgagaaactgaggctcagagagctcaagtttgagtacttgttcagggtcctaaaaagcctctttaagtagtagaactgggacaccaacccaggaagcctgagaagagcccaccgtcaaccaagaggctgtgcctctgccctttttgggtaacgaagcaaattcattttgacaataaggctaaaagtgctttcctggtcacaatgcctgaggcgtgtgggaggctgctcactggggagcccagaggcgctgaggacagcatctttctgcgtgcctagctagtcaaggggacttttcagagtaagggggaattcactctgtgctgctgggaactggactctgagtgcaggatgcgttaagcctgcactgaatgggaggaggcgaggactctgaggcttgcagaaccactgcagatctgtccgtgataccaacacatctaaggaaggaatatgacaaccagagtgcctcagagaagacaattatggccaagttgttccttggggagagatgaggaaatcaaagtggggaatacaagccacctgcccgccgttcttgcctgtggggcaaggatgtttcaccagctattccagagttgagagcaaattccccttcagaacttttcagcgttctttattctgagtttgtgctgactaagcttcatgtcattcatgatttggctgccagtgaggatggtgggggggcctgaaaagggaaaagggcaccgtactgtaaatgtatgaatggggttttctgtgggggccacaccggagcatcacagttctttgaaggacaggagagaaggtcagtgcctggatccccaggctaagtaccaggcgctgctttaggatagcctagaagggtggcccctgggcctcattctccacactgtcccaccccttttgaccacctcatctagccatcttgatgatcagttaagataagaatctctagtgaggctacatttttttgtttcctgaataatgcatgatgtccactgaacacatgttactagatgacagtgttgggctcagataaaacttacaacaaaattaatctgatgcagcctccatggctcacatgatccccaccatgtatgaaatgggctgggcacccagggacaggctattctcagaatggggttattgggtgtgtttcttattcctctctacctagtattcttggaagaaggtgaatgaaaatgctctagtaggggagggaaacatgattaatgggtgggggcttatgagtcagaaagacccaaccatcacttctgccctgactgcctgtgtgacttcagaaatgggggatatcaaagcctatctcataggattaaacagtttaatgtgtataaaatgcctaacacagtgcttgccacataagcattgctcattaaatgtcttctcttcttgtgctcctcattcagtgtatagtaaatgtgcagtccttatcttttaaatgaatgaaacatctcattaccaaatctattcaaggtaaacattgatattaatatgtatcctttttgtgtgtttctagaatcctgttacacctgggatttaggcactttcaatctgaaaaaatacatatcctttcagcactctggacggacttgagaactgtccttacgtgacctaaagctggagtattttgagattggagaattaaggtaagcgactttatcttcctgatccttgtgaaaccaaaaatagcttttggagttgacgacctcctgcagcacagcttgggttgtggttcttgacctctcggtgtgtcttcctgtgccgctccaatgtgttcgggaagctggctccccataacctctccccgacctggttctcagagtctagtccacttattcattgtgcctaggaagctctccctctgtccctagtggagggaggagcccaccatctcctagtgaatgcgccacttgtagcagaaggtgcaggatgctccagctgtcttgtgaaaacatgtggagacagccttggggaaaagaggaaaaggtgaggtgagggttatataatcagattgaaacacctttgggacatccagaacatgagctcttcctcctttcccagccaatccgtgcttcctcctttcacctccttgaattctatgctccttccacactaaggctgagggtgcaggaggtaaagggttagaggttaagactgagtgcttcaggtagacttgggttttcttggttttgctacttgcctcattttggacaagtcactcagcctctcaaagccttggtctcctcattagtaaaatagggatggtattagtgcctgcctcatgaagatgttgtttgtgttgagtgagatattggagcaaaacagcttagcaggctgccttgcactgaggaagaaatgctccaaaagggaagagagtttttgcaaattattcctcaattatgccatttagaattccttccatgtatcaggctattttgaagtctttcatttgctgtccccccagcctttcacctatcaccaagtcagcctgggaaacagctgagaatcaccttcccagttgtgcccagccccttacccaaagcagagttgattcccccctcccctggacggcagcgggctagtgaaggcatgtctccactataccatggctactgcactgggttgaaatgtcccttgccccttcccctgcccattccccctattgctggtgaaattgcttagagcaaggactgtcttacacatcacaggatctggcatagtgcctgaccgagggtgaaacaacaaatgaatgagtaattgaaaggagagagaaaaagagatagagaagtaaccaaaagaagaaagtttttaaaggttcagaggaaagaatgaggtcagttgcaattttttttaagtaagatgttggaaagaataaatgacatgatgaaaaggaaactgacatgattcctatcatgaatttgaaagctatgcaagggtggaaaggtgggtgagaagctgtggactggtgagaagacagagaagtcagaactgagagcatagcagagaactgtacttctgttgtgctacatatgtcatcttcatcttttgtattgtgccttaaattttcaaaagcgcatttgcgtttcaaatctgctgtgatagtcagcattcctgtggcatgcagaggtgaagagcatgaggccttgcccttcagtcaaggtggggatactggcacacataggatactacatactccctaggtgtctgtgaggatggtggaggggattttctccatgccgggaggcttcctggagcaggtgctgcctctcgtgactcttgaaagatgcttgtgaataaagcatactgggagctgagctgctgtttagtaattaaaaatcctttccattgtttagagctcagcacctttgtgcattcatattacgcattcattttcgtatcattgttgaatttctcacttctgctactgcaatgtatgtctacagctgacaagtcttccttgggagccctacgtagctcttttttttcttttctttcttttttttttttttttttttgagacggaatcttgctctgtcacccaggctggagtgcagtggcgcaatctcggctcactgtaagctccacctcccgggttcacgccattctcctgcctcagcctcttgagtagctgggactacaggtgcccaccaccacgcctggctacttttttttgtatttttattagagacggggtttcactgtgttagccaggatagtcttgatctcctgaccttgtgatctgcccgccttggcctcgtagctctttttgaccctcagggacagtcactgaattatgtcttgggagcccatgcttctgaggcaggcttagggagcaggagagcatacaggtgtagcagcctttccagctgatccccatgccctgctgcacctggagggctggaacaagctattctcatattggggaaaagggctgatgggacctcagtcatgtggcagagaatctgaaagccagaagcttggcaggtctgtctcggggtggggtgacggagagacatttccctagaattcagctgctgggagcagaaagacagagcaggggcaagtgctgggtttctgaggcccgcagtcctgagcatggcctcaggcagtctgttctatgacagaacctgaagaaaggcccaggcatttgcatctatgtgtgcagttctacttgtcctaaaggcacttctcacactgggagcctgcctgtctgtacctgtctagaaatcagcctggctgggacgcacaccaataggagggcatcctcacctttcccacccatgagtcgggactgttgcctgctgtgcagcaaaggcaccaggaacacggagtcagacacttagggtctaccccaggctccacttcccactgcctatttgactctgggcaagtcttttacagcttttcaaacttctctctttcttaaaacaaaaaaaaaaaaaaaggaaaaaaatttcttgccaggcacagtggctcacgcctgtaattccagcattttgggaggctgaggtgggctaatcacttgaggccaggagttcgagaccagcctggccaacatggtgaaaccctgtctctattaaaaatacaaagattagccaggcatggtggcacacgcctgtaatcctagctacttgggaggcttaggcacaagagtcacttgaaactgggaggcagagttgtagttagccaagattgtgccactgcactccagcctgggcaacagagcaagactctgtctcaaaacacacgtacaaatttttttcttttatttttttaaagacagggtcttagctatgtggcccaggctggcctccaatccctgggcttaagcaatcctcccacctcagtctcctgagtagctagtactataggcacacaccacacacccagccagacttcaattttcccagccacatcatggaccagaagccacttggtctggttgtgaggatgacggaaccttgcccgaggaaatgggcaatgaacaggagcctgtttgtttctccttccagctcctgacctgtctagctcctgaccctctcagtgtcattcttgctcacccctggccctgctccctggatatgcagacaggatgggcttcttccctttagaccttcactttgctcttttggactcctcttctggccttgccttcccctggtgtcatctgctggctccctgcctgatactgccacactggtcatgctggcctcctggcctttggtgacaccgcatcagcaggctcctgcttccctgtcaagggatacaagccagcaccggtctttcgccacaaggtatgtgtgtaaagattgcttcctgtacttggtgtccacaggattttaaagaactcctggcccactcggaactctacgcttgaaacagaaacatcttctcaaaacacctctggtattggcccatttctctattactgtttcttgtggtttcatactgaggtttttggtgcattgcaattgccctggagtttatttttagtaataaagacagagttcaattaatgtcaaaacatgagggtaattgcagaggaaggattagtaagtctaggggaaaatgtgcccaactttttttcttctgataacatctttcactgatcatacaccgtcacacccacagacacggagcttcctccgtgatgtctgcaatgcactaggcccagtcggggagcagtggctgcgccaccacctgaaaacgaaagcatttctgagtctctttcagtccagctcatctagcagccagccacacaggtgaccacccaccgtagctgtcactatgggtgatgattatcattatggttttgaggaaaggctgggctttagaatagtcaattcttatcctctctccggggggatttattctgtctccagaagcagcatttcactttcctgaacatcagctcttctcccctggattgcagggtctaggtcttgttctctgtctgcttccagcttttggcattttgacagcacataggacatgcttggagaacgttttcttgagttaactgaattcaggacactgacttggggctggaaaggcaaagtgaggaagaaagtattcccctttcagaagctccccagtctgccttaagaaacaaaggcagccctgtcatctgcccaggactttacagtttataaagtgatttctcatcctttctcctttcttgtattgcacaaatatcgaacgagaacctgcagtgtgccactgtgcagggtgcctagaataaaggagaaaagccactgtgctttctctgaaggaatcacagggagtgaagctagcttcatggatgccagaatttcacagatgaagggactggaggcttggagcaattgcattgcttgagatcccccctgctcatggatggtggctcccaaatcaggacatgagtcttctgaatcccttaaacctgccctgtgcctgcctgttctcccagcacattctctgtactctcttgtgctgctcctcaccccctctccaactgtctctccttctccaccattgtcctctgcccactcctagtcccttctttcagctctgtttcttctgaaaatgaggatctttctctctacagtgcctcttgtgggacgggttctgctgatgggggctgtgtttgggatctcgcctggaaacacgatctctccaactttccctgggagcagagccttgggtctcactgaacccacctccccagcaccttgtgtggtgactggcaggaggtagccattccctcctgtcctctctgcccttgtccactttcctgttatgagtcagttgctgagataggctatgaggagttaacagagtggataaaaaagagctttgtccttctttaaagccttcaaaatatacagatgtattagtcagggctttccagagaaacaggaccaatagaacatgaagatagatgcgtatccatgtctatatcaatatctaccttgatatttatatctatatctaggagatttatttattataaggtattggctcatgcaattatggacccagaggggtcctgtgatttgccacctgcaggctggagacctaggaaacagctgtcgtgtcacaaagggcagagggctggagaacctgtagtgtagattccagtccagattcgaaggcctgaggaccaggaatgccaagggcaggagaagatcgatgtcccagaacaagcaatcaggcagagatgaaattcaaccttcctgtgcctttctgttctattcaggccttcagtgggttgaatgaggcccaacccacattgaagaggaccatctgctttactcagtctcctggttgaagtgataatctcatctggacatactcagaaatgctgtttaaccagctctctggaaatcctgtggcccagtcaagttgacacacaaaattaaccatcacactgcagagacacagtctatcccaatacctgtatttactgggtaacgtgcatctcagctcaccaggctggtttgattgacttggcccaaagctgccctttgagtgttgagccccagctgacccctttgatccttcacagccccatcattaaaacaaggaccctgaatcaagtgactgtaagagccactcttgtcctgttctgtctgtatcctggctttgagtgtttatctaagctaagcccaattgactgttgtcattctttgtctcttccttgctcagacatcagttaggtatttattgaacactcctgtgttcacagcatccggctcctgggattagagacagctcttgactcctggttttgctctttgaaacctattggactgcttttcttttaagatacaccccccacattataggaatctatccatttctttgttcatttctttaattgtgcattatatcagtccgtcagtcagttttcctcctgaaatatgctaagtattgagaattataatagattctattaagcaccgctaataaagtactatccttatagtagtagtagtgtttgcggtgatggtcgtgttagtactagtagtaatcaagatggccatgaagagactgcttttaatctaccagtaatcatggtaaaaatagtaatagctcaaatgtattattcatggtgtttcaagcactttacattatatgatgtcatttactcttcacaacctgccaggaaatggaaatgattacgtaatatactccagtttgcaaatgaaggaatcttcctgcggaacgtatgtgaagcgcatattggtgctctgggcttttgcataatttcaaatgtcctttttttttttaaacttaaggctaatgtttagaagcttttgctaatgagaggaccatttgctaaatcggtataagtgctacacatttgggtatctccatcccaacatacctcttattgccattccccaaagcagacaccttctcctccctccctcaaggacctctgagcttgcactccaattcctctcccacactcacctttctcctttctgttcctcttgggatccaggtttatttgaggagataggaaaagctcctgatccagcaggttttattcttaaatttgtaacaaagtaaatcacagaacctccacccagcatccaggcctctggttctctccctccttcccaggtataggccggctttcagaaaccctgcaccacatagaccctgggcctgaattgctgtgagtaataatgactctgctggtaatttgtgtccttctgcttggaactgtttcctttttagtttggtcaccctcccagagctggtttcaatgggggcatacccattatgggatgcagggcatcctgcatcctgaggaattttttttcctccaaaaatgaaaccttgaaatgaggacattgtcctgtccacggactgcacaacaacactgagcctcaaggactcatactggcatttttcttcttttgcagagtgtgggcaccctggcttcaagctcacgagaaaccaggtcgggatttaaacaatgttgggttaaagcaaagtttcataaagacagaatcaagaaaaaaagaaagagaaaccaatctaagtgccatcctccctgagttgcatcttacctgagtcttcagccgccgccccctgctgctgtgggaggaaacgggaaagtgactggccatggggacaggggtcgggggtgtgagggttagtggtagcagggaggtagcacttctgtgaagccggaaaggagacctgaacctggctctctgctttgctgcttgccagccctctggctgggaagaaggctcttggctcttgtgagcctcggtttcctctgcagagtggcctgttctgaggacaggctgacattgctgtccatcagtcttccaggaccctgaggatttcagctctacccatgggcactgaactggaacattcactggtcatttgctttcgttttttttttttgtttgtttgttttttgatacagagtttcactcttgttgcctagggtggagtacaatggcgtgatctcagctcaccacaagctctgcctcccggggtcaagcgattctccccagtagctgagattacaggcatgcgccaccacgtccggctaattttgtatttttagtagtgatggggtttctccgtgttggtcaggctggtctcgaactcctgacctcaggtgatccgtctgcctcagcctcccaaagtgctgggattacaggagtgagccaccgagcctggccgcttccggtctttggatttgattttcctcaagtgtaattgaaagcaggggcctggatggccgccatagtccctcccagcttcgacattacacattcctgccaatccatttttcaggctgataacattgttcagagtttaatgggagcagggtaagatagtcaccgtgtggagcaaaaattgaaggaaatattccagatgtcatgattttttacctgtagcccctctgctgccacacccttgtgcacatcctccagacacttttaaagaataaactctattttcagaagagttttagatttacaggagaattgtgaaaacagttcaaaaagttctcatataccctgctcccagttttccctgttactaacgctttgcattagtgtggcacatttgccacaattaatggaccaatattgatacattattatttactgaagttgaaacattactttagtttttacctggtccaggatcccatctgggatcccacatcacatttagtgatcatgtcttcttagattgccctgggctgtgccgctttctcagactctcctggtttgtgatgacattgacagtcttgagttttgatgaccagttttgactggtcaggtatttcatagaacgtacctctgtgagggttgtctgattcttcttcttattagattgggattatggaggaaggccacagaggtaaagttccgcttttatgaaatcaagggtaggcaccatcagcatgacctatcactgatgttgactttgattacctggctgctgtagtggttgtcaggtttgtccactttaaagatacttttgtgtttttgttctttcttaactccctttttatattaaactcttcagaaggaagtcactgtgcatagccatcccctaagaagagggcattcctgctcttccttctccatggctagaggatctacatgaactatttagattttttctacctgggagatttaactcctctctcctatttatttatttatatatcagcatggacttgcaggtatttatttgataatttttaatttatttgagttataatccaataatatggttttattttgttgctcatggtttttcttccttggctattgggaactcttcagttacttcctgtgcccatttgacatactttcttattatgggtctttctttcttccttttctttccttctttctttctctctctctctctctctctcttccttccttcccttcctccctccctcttttcttttcttttttcttttctttccttccttcctccctccctcactccctccttccttcctttttcttccttttttccttccttccttccctcccttcctcttttctttcttctttctttctttctttccttcctttctccttccttccttccttttcttcctttcttttcctaccttccttttccttccttcctttcttccttcctttcctccttcctcttctcctcctccccttccttccttccttccttccttccttccctccctccctctctctctctctctctctttttttggtgcatccatactttctggcactataagatgcttagggcttatcttgtatatttccagccccagttatagaatcagccatttcttcaaggatcccctgtcattttactggagaaaggacttagaatccaagatctgggtgctagatgtgcttgaggtgttgtttcctccagatcttctcaactgacagagcagtgaaatatatgtgtgtagggaggatggggagaacaatttttttaacacatatgaatacttacctggcaggggagataccatgatcacaaaggtggtttccccagggtgaggcttatccattgcactcccgatgtgctgacccctgtgattcccccaaatgtgggagacttgactgcataatttgtggtaatgggggactgcatttacacttttccctgtaaaaatttttaaaaataaataaatacataaataaataaatgtgtgtatatgaatccatgtgcatgcacgtatgtgtaaatatttctccaggtatccatcttatctatgttaagctaactatgagtttatactgctgtctccaactctaattcattaccacatttcacccattttttttttttttgaaatggattctcacactttcgcccaagctggagtgcagtggtgtgatctcgtctcactgcaacctcgctctcccaggttcaagcgatcctcctgcgtcagcctcccgagtagctgggattacaggtgcacaccaccacacctggctaatttttgtatttttagtagaaacggggtttcaccatgttggccaggctggtctcgacctcctgacctcaggtgatccacccacttcagcctcccgaagtgctggggttacaggcgtgagtcaccacgcccggcccccatccacttttaacaaacttgttttctttttgcccacattgactgacaaaagaaggtaatgaacagagatgttggaaagttcacgtggggcaagaggagtgggctgagaacattggacttttccctatggtcaatgtggcctcattcaacaaaaatcaagatgagtcagatgcatgtagaaagagactccgaaatgtgtcctgcctagatgtttgcaaaccgggactctgtgttatgctcacaggcctttgaatgtgtctctccctgggcttcatgtgcccttgctggtttctggactgtcctgttctgctcctgtcctcctactgacagcctttcctgctttcctttccctcccatgccactcccactccatacaacctcttcccctgcacactgctcctagaaccccttggttagccccatcagggatgtccctgctttcctgggacccgaggcacacagaatgaggatgaaacagttgacgtatcatgtagtatcccccacctggcttccttctcagccaggcgtcccaaactcaattgtctgcagaggccaggcaggcaacaaaaataagtgatgtgggcctcctgggcagtcaggagggcttggtgcagaactggaagcaccagaggtagcaaggaaccaggagatcaggccagcacctgctctgaatggtcaggcacctccatggttgcatagcaaatcagttgttgagaaatgttttgactatggtccttgtgtaggcccagtataaagggggaaatggccagtctgtggctgctgattatggccctgaaagtctgcaggcccagaatggccagacctggttgttcaaaggaaaactggcaggtgggaagggcggagggccttgccccttcccatttgcctcctgtgcctgacagtgtcaccgtagcaatactttcctggcagcaggactttgtcccataacaatagttgattttagtgtgtagggcttttgttgttgttgtttattccatacttggaaccagctgcgttgtgctactatcagagatgacagcccagcctggagctctgcaaggtcctccaggcttctcagttctgatcattccaccagcagatcccatcaccaaaggggtgtacttgcttcatgcagctgctgcttctcccagacctcattgtcccccttgtgccttttccatgttcaatacaggatttgttttttatctgaaattctacccgttaaaacatttggtatgtttcctcttctcttgtgaggtgtatttctgtatttcctacctttgcatcctttgctcagttcaacttgaagcaggtttccaagctcatcacttggaggcccagggcattgccactgccccccaccccaccgcctaccgcccacctgcaggtctgtgccaggaagccctgcgtgctgtctgcaccccgtttggctgcttgcccacaaccatgactgctcctgaggggctcgccagcagcactgtttcccagcctgctgtgcataaaggtgacgcttcgggttttccacagtgaacaatggttcccagagtgggcaggactccctagtgtctgcaagggtgtgtgaccatgcagggtggaaacaaccttgtcaaaataaaccagggcagtgctgaggggggaagtgaggctagctggggggaaatgtgggctgagtgcttcttggggggtttcctctgtaccggtgcccagctgcccaagggtcccagaaggcagaggctgacacacttcctgtgaccctttcagactcgccattggcccccaccagatcaggaatctgttttcccttgttgaccttgagccactcacagagtgggaaaggtttgcctatggaacgaaaacagtcctccttccatgatttcccctttgctcccatgttcatccatgtgggctgctgtaacaaaatcccataaactgggtggtttacaaacaacaaaaatttatttctcatagttctcaaagctaaaagtccaagatcaatgcgctgggagatttggtgtctggtgagaacctgcttcttggttcagtgtcttcttaccgcgtcctcacatggaggaaggggcgagaaagctttctggagcctcttttgtcaaggcactaatcccattcatgaggactcaacactcgtgactggatcgcctcccaaagcccctacctccaaatcccatcaccttgagggttaggatttcaactatgaactttggggagacaccgacattcagactgtagcagctccccagcacaatcctgctcgaccgaattcaccttcctgaccaggcacgtcaacaatctttctgtccctctgatgccagaacgttatgtttctgagggtgaaacttgagtgattaattgacagtattcctcaggaatccttgctgattgctgaatgcataaatgagtgaaagacctggataatccccaacaggcgcctgagtctcacatccgccctgggtgattccccatggccaggggcccacctcggttcccagggatccatgggcatgatcattgtgatgagccactactctccaatctggcctctgcacctgtgtgacattttcctcccattgctttacatgttactctttcttattcagtaggatgtgcagattggtcagggtgtgtattagtttcctagagctgctataacaaagtaccacaaactaggttgcccaaaacaacagaaatgtattctctcatagttgtggaagccagaagtctgaaatcaaagagttgtgagggctgtgttctccctgcagatgcccagaaaaatcctccctttctctctcccggcctctgctggaggctggccatccttggcgctctttggcttgtcattgcatcatccaagtctctgcctccatcctcctgtgtcctctcctgtgtgtttgtgtccaaatttcccttttcttagaattgcatcttctctaaaccagcatgacctcatcataacttgattacatctgcaaagacccaatttccaaataaggcacattcacaggttctgggagttaggacttcaacataacacttctggggacacagttaaacccacaacagagtataaggagaaaatgttacaacttcctttctcttcttttttttccttttcttttctttttttctcttctttctttttccttcctccctccctgtctccctccctctctgcctccctccctccctccctcttccttccttccttccttccttcctcccttcttttttctttctttttttgacggagtcctgctctttgcccaggctggagtgcagtggtgcaatctcggcttgctgcaacctccatctcccaggcaggttcaagtaattctcctgcctaagcctcccgagtagctgggactacaggcacctaccaccacaccttttttttttttagtagagacaggatttcactgtgttagacaatcctgcctccctccctccctccctttcttccttccttccttctttccttccttccttctttccctccttccttcctctcttctcctctcctctcttaccctcccctccccttctgtctcctctgctcccctgccctcccttctcctccttctccttctcctttttcttcttctctttgttgtccaggctggagtacagtggaaggatcatggcccactgtagcctagacatcccaggctgaaatgatcctctctcctcagcctcccaagtacctgggactacaggtatgtgttcccatgcctgactagtttttgtattttttgtagagacaggatttcatcatgttgcccaggctggtcttgaagatatctgcttgcctctgcctcccaaagtactgggattacgggtgtgcgccattgcgcctggcctgttgatttcttttttataaaatgtctttgttttcatccctgttattataataataatataggcattcatatgcatatgtgtaaattataagtgagttcttatatagatttgggggactattctccaacatgactgatgagggcatagtcaaaagacaaattaatcaggccaccagtctgatttatgaagcgtctctgtctttgtctatttgggctgctataacaaaatatcatagaataaagggcttagtttattttcttactgtgctagaggctgggaagtccaaggtcaaggtgtgaactgattcagtttctggtgggggctctcctcttggcttgcagatggttgccttcttctgtgtccttacatggttgtaggagcagagagggttctctggtgtttcttcttataaggacacatatcctttcagattaggacttcacccttaggacctcgtttaaccttaccaacctccataaggtttctatctccaataaagtcaccttaggggttgggacttcaacatatgaatgcagaatggatgctggcacctttcagtccacagcaggccgcaactactgtatttcattgtacaataagatccccttgactcttgtgaattataatgaacattagtctgtaaagcaggtccttgtaatccagccagtttgtatacagtaggtaatcaagaactatggatttactgggtttattgggtgggggagaagggagggctttattcaggtgccagcacttcttcacctttctctacatttgctcatcctggaggtggggttgagctgggtctgccttgtcccctcacttccctctctgccgagagagtcctgagcccacccattactggtagcaaagcccggggcacaatctccgttttcctatttgtaaaatggagctaacagtagtacccatctcatcagatggctgtagagatgaaatgagataatgtatttgtggcgttaggacaacagtggtcctgctacagggagaagcctgggccaggagatagactagtctccagataccactgaagtagcctttcgaataccaattacctgcctcactttgcagctgtgcagccctgaacaagttactttccctctctgattttccagtctttgttacctgtaaatgtaacaatgcctttctctatgttgttgcgaagtccacataaagtgacatgaaattgattataaaatacaacacaggctgggcacagtggctcacgcctgtaatcccagcactttgggaggtggaggagggcagatcacttgaggttgggagttcaagaccaacctgactaacatggagaaaccccgtctctactaaaaatacaaaattagccaggcatggtggcacatgactgtaatcccagctactcgggaggctgaggcaggagaatcgcttgaacctgggaggtggaggttgcagtgagcggagatcacaccattgcactccagcctgggcaacaagaacaaaactccatctcaaaaaaaaaaaaagttacaacacaaaggttggcaactatcactaataagtttgactgggaaacctcactactacatttgtattgtcttagaccaagcttgtgagatttttttgttatttgtttttgaagctcatcagctatcgttagtgttagtgtattttatgtgtggcccaagacaattcttcttcttccaatgtggcccagggaagccaaaagattggacacccctgtcttagacttttaaggagctgtgactgaaggatggagactgggccaggtggggcttggtgcaagtttaagctcttaggtcatttctaaatagcaaacctctcaaatagcatccaacagatatgccctagtcttgtcgtctttcccctgctatcttttgtacatgtaccttctgctgactgcagtgtgtcctggagccctgacttagttaaacctcagaacatccctctgcatccggatgcatccagtactctcggtttgtctggctcctgctgtactccctgcatctgcccagctgctgacacagccacatatggcttcctttgccccagctttcagcattctggtggcttgtagtgctgagtgctagcaaagaaagtgggtactctcacacactgctgctgaaaggtggagggtgatgaacaggaccaacagctctaaaagacgtttcaaggccaggtgtggtggctcacacccgcaatgccagcactttgggaggccaaggcaggcagattacttgaggtcaggagttcgaggccaagcagccaacaaggtgaaaccccatctctaccaaaaatacaaaaattagccagatgtggtagtgcgcgcctgtagtcccagctactcagggggctgaataaggagaatcacttgaacctgggaggcagaggttgcagtgagctgagattgcgccactgcactccagcctcagtgacagagtgagaccttgtctcaaataataataataataataataataataataataataataataataaaaagataagggaaatttgggcaggacttctccaagtttagagtatatgcaccctttggcccagcaatcccacttctcggagtctgtaccctagaaatagtgagggaagtttcaaaagatatttattcaacagcattagtaatgtatcagaaccttgaagacagcctagctggtcaacagtacaatgctcagttgccactataaagaatgagatgctgtgtccttctcagtgcctcagatcaggaggcacctggtgttggcttgtcacattactaatgatgtttacttccatcacttgattaaggtgatgtctgccagatttctctactgtaaagtttctatttttttttctgtgtaatgaataagtatcttgtcaggagatgctttggacctatgtaagtatcttgtttctcatcacactttcaccaaactaattttagcattcgtggataattcttgtctgaaacagttattactacagtgtgtgccaaacagtgattttctacttccatcattactcctacatttgtcaattaaaatgttactataaggaagatattttcttttatattgaaaaaatgcaattttttaaaaatcagtctggactcttggattctcattatattggttataacccatgactataatacattttgtgctcagatttttctagattttacattgggatgcccttcaagttgggttctatgtatttttgccattttactgttgttttttgagcactgccttaccttttgaccccacaagatattctaggctcagtgtacactttgcctggtccagccctggaatcagccattgctgctgtgctatccttgacagaactataacctgaatttaacaaggaggaaatatcaggcaaacacaaatggagtgacattctagttaacaactgatcagcactctttaaaaatgaaagacaaagaatgactgaggaatgagttcagattaaaagagacgaagggacacgctccaactgtaactgcaacgcatgactgcgggctgcgttctgcattggaaaaaagtgttactgatgaaatttgaatatcgtctctagattgagcaactaagcaataatattgtattaaattgctagattgggcaatagtattgtactaaagttaatttcctgacacagttaaataattgtactgtgtatataagatgtcaaaattgagaagttgcaaggctaaatggaatttctcagttttttaaactcttactttgtacatctgaaattattttaaaataaaaactaaaaaaaaaaaacctaaatacaaaccatgagatagatttatatgtactaatatgggatggtgtccacaatcaattggaaaagataagttgtagtaccatttgtatagaattggcccatttttgtaggagcaagacagaacaatatagtgcacatacatatttatctacacatgggagaaattctgtgaagggtatgtacttcctgttaacagacatttctgggaaatgtgtttggaaggtatgagacaccttttactttttgatgtctcctgataatgggaaaacagtaagaatgtgggttgtatgcatgagtgtgattctacacgtgtaggtttaggtttgatgtactcccatccagcttattctcttttgcattttccagcacaggcagtgctgtgcaatgtcttgcccagtggacacccacctaattttcactccacaaaccactgtcctacatctgatccttaacaaagtatgttagttgtagacacaaaggtggcctacatttcatacttgttgacagtaatgctagttgactcatcttacctttgtctgaggaggctggaaattgtttgtcctcagaaactttagggagaaatttattactaagattgtatcattttggtctccccagagaaatgaaaaattagaaattggccatgtgacaatcgttgcatttacctctttaaggagcagtgattctttaagtggtgcttgatttatctaaacccgattaattagtgaacggtcatctgtttctcccaggaatttttaatgatcattaggcttttgtagttactgtgaaattttgtttacgtggatttatttttgtgcaggattgtatacagggcagatgctccttaatttaagaagggagatgtgagaacaaaagtgtcttctcttgagtgagggcctgttatgtgccctgacttgttacaaatatcgactaatgtaaccttctctaccatgtacctttcttccaatttatcaatgaggaaactgatgcaaaaatgtatgttcccacaggctctggtgtgttcactgagttagctccagaaagaactgtccccttctcatgcctgttccctacttcttttgcagctaattctccgaaatggtttctgtcttcagctttctgggctgccccatcacctgtgttgcttctaaatgttagtttcattgctgccttctgggttcctctgcttctctctgacatgatgtctctacggatgcatctctcagtaatgattataatggtggtgatgataataaaaagagaatacacaagtgtttttatcaatccctgaccatgctgggcacaatgctaagcatgtgcaggcatgatgtctttattctgcccactcagctgatgagattgaaggggctccctgcaggttggggcctgaaaaacacagccaggtccatctaggaactagaagctatggtcaggcttacatgcttttttcatatcagtgttcatgtagatgtttaagctcttgcagtaggtttttgcaagctagtgaacgctgccaaattatgctcgccacacaattgcagccacctattcccaggcagtataaatatatggctgaactaacattaatacctatcactgttttatcaagtgacataatcaagataattatgaagtatccaaatattaattttcatagattaaaagcagataaagtattagaaatctgcttatatcattagcagaaacatttttgggggccacagggtaaggaaaagaggggaaaatattgtccttcaacaaaagtaatcatattctagtaagtataataaaagaaatgacaagcttttcagaatttccacgactaaaaattgttttagctgcagctaaaaaagcatcacataacaaaatatctcttgtttaaaatatttgctacaaaaaagtcctattctatatgtcctgcataagaacaagtatctttatataagaaatgtgtttaatagccctctttcattctttttctgaagccctccctgttaaattgcacccaaaggggaaacattaattgaactgtaaagctttttttttttctgtctaaagacattaaagacatataggtggtattaaatgaacctttaactagagctctgtgagttttcaaaatagattttatttttctttaccataggccaacagagattttgagaaacacattgaaggatctgttaacacttgatatacccaataaaagcagtggttgtgccagtgctgatctgtcttgatgtgaatgtgaacaatgggaacctgagctgagcaggtaaataatcatgtagtacagtcaccgtcttcagtgtttgagatgactagcagggtaaaccacgctgtgtctaagatgcagtgttaattctgtttgaagtaaaaatatgcaagtgtggtactggatattttggcacgcaatcttgcgaaatttctcattgatgagattctgacataggaactacatttgagtaagaatcatagctcaatacagcatgatttcaggaaagtcgactaagataaaagtgtttctgaggctgaacagcaagaatcttttgctaagagttagaatagattgacaagaacctaaaatcagaagttgcaattctgctgagatactgcttttcagttctccggtggaagcttcattggacatattgtacatcaagcctctatgtgactgattcctgcctctttatgtcttgttttagattctccatggcagtagctttaggcaacccagttttactgaatgcagcaatggtttcagtgaccattagagtccaattttaggatgatacttctccaaattgttaaaactccctggtgcttttctcttataaactgcaaaatgtcttcatatttcatcccgcttttcagttaatgctagggtgacagaaactggacctctcccaagacatgtgacagagtaatacagcagccaacttcttcgccaaattaaagttttacaagatttaacctgtcatcaagacctgggattttggtggtgagtcatcttcaaaagccaagttcggtccctggtttgccttcttttccgcacaagaacaagggttttgatggctctggtctccaggaccatctgtggctttctattagcaataatcgcacctcggtgaaacctcattggctacgatactgccactgcgcaaagctcatggctttctttaatagcaaatggcctctgacttttaagaagccatgtggctacccctcagcagacttaggagaggtcttggctattatttgttgttttataaggtgtcatcattgagcatctactctggatgaggctctgtgctgggcttgaggggtacagggaagtttcacatgtcccgtcttgttgaatcacacacacttgatctcactacaacagcagaaaacaagttaaagttccccaggggttgacacatttgcctgccgtgtttattgctgctgtgatttctgcagcatggtccaaagaaggcaatcagtcaacagtgaatgggttgagattttgtgattttggtttaggagtcttaatctctagaataaaatctaatgaaagggtggggctatgtttttctcttgccttgacttctttgactctatttgtaaattccaaatttacccaggcctctggctcattctgtcttaaggtgcggggacctctaaaatgtagatggcaacaatctttagactatatgtgtcttgatggtagggcaatcaaattgatttcctcagcatatacgagtcatgttttgtaagcatggtgggtacttagtcaatgtctcaatcagatttgcttctgtttagcaagataatcttttgtgggggagtgttatggactgaactgttttccttcttccaaacgtatatgatgaaacctacccccatgtactcagtattaagaagtggacctttgggagataattcaggttaaatgagattatgagggtggggctctcgtgatgaaattagtgccctcaaaataagagacctcagagagcttactgtctctcttctctctctgctacgtgaggacacaatgagaagggagccatccacaatgcaaggagagggccctcatcagaacagaccatactagcaccttgatcttgcacttgtagtcttcagaactgtaagaaaatgaattttctattatttaagccacccagtctggtgcagtctattattgccttccaaatggagaaatacaaggaaactagggccgtcttagcttcacagagagaagatgtggagaggagttaggaggtagagactggaccttgatggtggtgatattcaattagtgaaaggctgagaagaggtcaaatatacttcttgtggccccaaagatcagaaccaaaatggaaaggtagaaacagtaggcaaacagaaagcaacttaataaaaggaaaaggaacctgagagaatgctctgtctctgacagtggttgggatctcatcactggagatatccacacagggactgtattactactgagagggggtggggctgaaaggatccaagcattgcactgtgatgcgaccccataaggtcacttagtctttgggacttgtgagctcacagtgaatcattacaaacagaaacgattccctcttatttgtggagcacattaaaatttccaaagcatttttgtgagtacattagctcccatgatttatatcaaaacattagagttgacattcaatacacatttgctgaatgagggggatgcatgaaggagctattgtggtaccttggttggcagaagaggaatacatgggcagagtcatttctagacttgctaggaaaggccaagccaggcttggacctgggtctctactgtactctttactctactcagtcttttccaaggtggaaataatattttctctgaggctgatgtttttctgtttgttttgcattttggtaaattcatcaacatcaatatcccctttaatgctcacaaatgcccttagaaccagcttttattgttctcattttgcaaatgagaaaatggaggcttcaagagttgagtgagtttagcaaggttttcaactcttcttgggcagagcattagggttgcagacagttgggcaccctcttcaaatgaatgtgagccaacgttggccctgttgggtgtgcaaggagttcttgcagagttgatggagaccctgtttcgagtcacatgaataattaatctagggaaacagtagtcaaacagtcaactcattctttcttgcactcttgctgatcctcagcaatttctcggctgctcctcctgccagagtcctgttttgtaccttgtaaacaagtcactctaggagttcctagtcctggctgtataccatagtcacctaggggcttgcaaaatctactaatatccaccccactcccaccgtactccagagattaagatttaattgatctagagagggatctgggctttggtgttttaaaaaatctctttagatggttgagaatcaccaaatttttgttggtgtggggcaggtttgcacattcaggttcatgggttattggaatgaggcatgaaggggcctgctatgttcccagggcctgctagctctgtgccgattgcttttggttttgtagaaatgatttcattccttcttccctgaagccatcctgatttgaggtcatagtctatgggggtgccatgtggatttatactgcaactcttgtttttactagctctgtgacctcagaaaggccacccccccttccctgtgcctctgtttccatctcctctgtaacatggggataataatactagtttccttataagtctgttgtgagcattaactcttgggattatgcctgttgaatagttagggttccacaaataagtcttgcttaatggtgttgttatcattgtaatagctgcatgtgtgtgagtgtataaatgtatgtaagatatttttcctgtttttttttccccctggcagagttagccacttcttcctatgtgtaagcatatcatcactttctatttctattatggaattgtaatgtgtttttgtgtccctaacctgatatattcattccacaaatgtttattgaacacttgctgaatgctgaggaatggacaagagagacacaatctctgcctcttgagccatttgaactttgaagaggacagatgatgacaagaggaagtggaaataggctaggatgctacggagactagaacaaatggtccttattcgtaccttgctgtgggggagactctcctgacagagttagttgtgtcacctgcattctttctttcccttccacatatagtgtcctgggacttactgtgattacttatctctctatccctcaacagtaagtcctaatcattggggctaggaaatgtgccttgtcaaatgaattaatgaatgaatcacgctggaccaaaatgaacaaaaagttatttttttgactcaatttagcttaaacatcacatcctgagatgctgtgttaaatcctggagtcacaaaagacctttacagaaatctttacagatttctgggaactatagacacgtatatgaggataggtttggaccattgtagctgctgtaatagctgttgttctggtgagcagtggggacccaagtgttagtaggccctgcaataaacatgtatgggcctgagataaatgggtcagtgtctctcacgaagctctgtttcgtcaaggtgagggaatgtgtcttttttgcatttattccctcccagggtttaggtcactgcctgacacatggcaggtgcacagtggatacacagagagtggccagacagacgacatagcttttctctgtggatttatcctcatctctacaaggggggttagccagtattttgagggtctccctcaatgctcacattctagaatcctgtgatgggtgctgaaacaacgctccctcattggagctgcttgagaaggtcattcattattttgcgatatcttcagactctcatcattgctagaagctgactaattatgagaagagaagtgaaggccttgaaatgcctctctctgcacatctggcctcactgtcaaataaagtacttatttctgataagctctttggcttctgtgaagccgcctggccgtgtctggccgtgggcggtgctgataatgaaccgaacagagaacacagacttggcggggaaggtggggacccagtgggtagaaagaatgggctttttagaccatttcaaagtaacaagaaagctttgagagtgcttagtgatgtctgctaccacattcatttcctctgtttccattgaaattgaagttctagatggactgaacctgactaagaaaagggaatgtggacaggaaagctaatgacaaatgcaactggcttatttctggagtgctttgtactctcagagtcttgtgccctgaactttcttcatctggactctaggggcacttaagcaattagcatgccacaagctgggtgctgtggaaagatcatagactttagaaactgtccaagaaactagtgggactccacaccttgtgagttgtgtatccttgtcaagtttaatttaccatgttgagcctcagtttcctcacctaagagaaagaaaagagaaatagatttatttatttatttatttatttatttatttatttattatttatttatttttgagacagggtttcactctgttgcccaggctggagtacagtggtgcgatctcagctaactgcaacctctggtatctgggttcaagcgattctcgtgcctcagcctcctgagtaactgggattgcaggcgtgcaccaacacatcaggctactttttgtatttttagtagagactggttttcactatgttgaccaggctggtcttaaactcctggcctcatgtgatctgcccatctcggcctcccaaaatgctgggattacaagtatgagccactgtgcctgtctgagaagtgattgtttagttagagtaactctagatgacataacaaataaacctcagtattctagtagctcaaagacacctctttctaagtcagataatagtttgaagctgggcgcagtggctcacgtctgtaaccccagcactttgggaggccaaggtggtagatcacgaggtcaagaaatcgagaccatcctggccaacatggtgaaaccctgtctctactaaaaacaccaaaattaactggctgtggtggcatgcgcctgtagattcagctattcgggaggctgaggcaggagaatcgcttgaacctgggaggcggaggttgcagtgagccaagatcacgccactgcactccagcctggtgactgagcaagactttgtctcaaaaaaaaaaaaaaaaaaaggtttgagaagggttttcctggtcattaggtggcttttcttcattctgtgatctagagacccaggtctcttccatgttgttgttctgccatccctgggaccttgaagttactccaactggcagcggagatgaaggacaggagagaaggcacaccacttcttaaacacgtcttctggaagtaggctacaatcatttcacttgccagggataagttctagacgagctttagaagggggatggtctttgggaagccaaggtgggaggattgcttcatctcaggagttggagatcagcctgggcaacatagcgaaaccctgtctctataaaaaatacaaaaattagccacgtgtggtggcacatgcctgtggtctcagctacttaagagactgaataggaggatcaccagaatctgggaggtggagattgcggtgaaccaagatcacaccattgcactccagcctgggcaacagaccaagaccctgtctcaaaaaaaaaaaaagggggcgaggatggtaaccattctctgccataaataccttagtgttgctcaagaataagtgaggttgggtttgtgaacctacccttgcataacatgtgtcaccaactatggccttacttatttgtggattgtttgtaggtacacatggcctcacaggaccattcgtgtggtcctgaaattaatgtatccctttggaaatatgtggtagacatctctctgtgttattaaggatagatctccaccatgaatggaatggctaatgcttacagctggatcatgatttacattaactcctcccttgctggtatcttatagattgtctttggttttgttttcactacaaaggagacagcacgaattctcctacaggctcaccacacaactggtgctgtgagggagacgaagatgagtcatgcctgtactgctctttaaacactcacaattgaataagctacccaggtgacacgacatggttatcctggccagaaagccatggcttttcctaatcagagcttcagtgctgtggaaacttgaagtttggagggtctgatgtctcagtctggatgaggatgagttccctgccattcctgggttagcagctcccatcctcttagattccaagatggtggctcatgcctgtaatcccagcacttcgggaggccaaggtaagagtatggcttgagcccaggagttcaaggcaaaactgggaaacacagcaagaccctgtctcaaaagaaaaagaaaagtttccaagatggtgtagaacatcagagaggggctcttggagattatctggccatcgtcaccccacctgcttatagatggaaatgcatagactcagagaggttgggggacatatgggcagctatagaaatccagtggacctcaaatcccgacatttctaacctgaattaaattctctcacccttgtatggaggtcctagagtcctattttccaaactttgcctctgaatgtctccatgtcaaagggtttctcagtgtgccagagggcaatggagaatggagcagaaatgaccacagaagaacaggtgggaagattcctgcaacagcaaaaattctgctgcccggttcctgagacatgaagaatgtgttgtctacacaactacatggccagctgcctccttaattttttcattttgttttgtttctgagacagagtcttgctctgtagcccaggctggagtgcagtgagctcactgcagcctcaacctcctaggttcaagtgatcctcccacctcagcctcccaagcagctgggactataagtgcatgccaccaagcgctatttttttttttttttaatttttttagaggcagggatcttgctatgttgccagggctggtctcaaactcctgggctcaagttatcctcctgcctcggcctcccaaagtgctggaattataggcgtgagccatcatgcccagccctccttaattttttaacatgaattaataggacctggacacacacagcctcatttatatcggcagccatcacagcctgccacatgtcagatgaggtctctggggctctcactccttgtgtcgggggtgatgccacatgtggcccagctgtaggtcacattcagctcctgtgttcaccaggatcagatggaatgccagcacatcttaccctcctgcgccctgggagtttgtaataatctacgaatacgtagatttatttcagagaacattttccgaatcctgttgcgcatacgcacaaaaatattggctgcagtgtgtttataaccatgaaaattccaaaatagcttcaatctcctgtgagaggggagtggtggaaggccctccagcacgtgcacagaattctttcttcagccatgtaaacatgaaaataagggttaaaaatgacttcattatggggaaaagggacaggatgcaaattgttcaaatggcatgatgatattataaggaaagaaaaagatgttataaaaggtcacataaagtcacccacaggtcagcagtcatgtcatgattagctgctctgtgccagacacaggctggaaattggtagatgctctccccaggaagtgggcagcagcccctttgtgcctctgtcacctctgttaggctcctggaagcccccttcattgctgcatgtaatgacatcttcgtcaccacatgtaacagcttctttaccactatgtgtaatgccattctgtgtgcttattgggctaaacaatcacagaggaaaagagtgctggagaaatgccagggagataggtaccgaaacgttccagatggaaagtctcgtcttcaggtggccgtagcagtaaatgtcagggtcaaacagggggtgtattcttgggagagcttcagctcgtctgtgacctagtgtccagccagcttcctgggaaggaggctgcatcctgacattgaagccctgtgtgctaggatgagtgtgttacgcagagccttacaaatgagaaaatcttgcgtcctcaggacaggcagttagtgttgctgtctggaatacactggctacctccctcctccccccaccacttaaaattccctgaatccgacagtggtagggaaagggctgatcctggagaagattgttccttgataatcctagtatgattcataatggttgcagcagatgagccgcgaggtttgtggctcagtctgcagctaaggaaggctcttccctggggaggtgtgtccagcttcccggaaagacctcagctgtctagctggtctgggctgcccagttcttagcagtgcatcagcaatgagcagccgctgaccatcaggcagcgtttcccacctgccagagaacgtcagagccactgcgtctggaccagctgaaggcagccacggtgcccaggatgctgctgctgcctccaaggaaaagaactctgaaaatgaggaattacagcctggtggttttgttttatgttaattttttacatctgggagataatggaaaaaattaaaaattgctataattgcaccaatcttaaaaattaataatataaagacgggaaagtaaccaacacaagcttgaaacccatcccgccccttcttgagataatccctgttgtcagtttggtaatttatgcaaatgtagtggtgcactgttaaacttctcaagaggagaaacaaaaaccctgaattgtaggtttgtcaatttcaatggtgaaatcccaccgcagccgatttcaggcaaccaaagctttaaaaacgagttcgcaaatttcttgaatatttaacaatcagcttttgcaagtgcatacatgctcacaacgtttgcttttttgtactttgttttgagggaggcaggaaatggaaacttgcaatggtattgataagtgtgccatttttatttacggtatcacggatgtcttcctagaccagcatgtgcagattcacttagcttctctcacttgtgggatggggtttccatgaaggctcactgtgttgcttctggaaaggcagaatcggccccccaggagacaggaatggcagcagcttggcactcggaggctagctcctgcaatgctgtgcacttgcagtggacaaaaaagtaaactttggtgtttacttggagttcactctagctttggtttcttctaaatatgttcttccaatgacctgtagcctaatcaactctgctggcaacacatccctttgctctgctcaattccagtttccatcagagaatctcatttttcttttgggaaatgtttcctgattttcgtcttttccaccacccctcactgaggctgggtaaagtccttctccatgatgtttagaacccaggcctccttctgtggcagggctctctaccccttatgatttattgtgtgatgtctcaacctgtttcctgtggagaagcagagaagctctggtaaacagaatggccctctaaagatgcccatgccctaatctctgatgttatgcctatgaatgaatatgttactttatatggcaaaggggactttgcagatgtaattaaggttactaatcaattgacttctaatagggagagtatccttggttatccaggtggatccaatccaatcacacgggcccttaaaggcagaggttttctccgactgtgatcaagaaaatgccatgaaagattgtaagtgtgagaaggagttgatgtgccactgctggctctgaaatgtggggcccacttgtaggaactggagggagagactggttgctaacggtggcccctagctaacagccaacagagaaatggggaccgccggcctacagctgcagggaactgaattcagcaacatgaataagtttggaagaggatccttccagaacctcctgataggagcccagtccgctgtcaccttgaattcagcttcatgaaccaggagcagggaaaccagctgagccaacccacattctgacctaaggagcactgaggtaattatatgtgttgttttaagccactaagtttgtagtaatttgttatagtggctgtagaaaattaatacaggatcctagtgtttgggaatgcaggccccaggccccgctttttccagagcgtgtttgcactttcgcaggggaccttcaagtcccagtagtagctcactttcaggtgtctcagctcagcttgccctgctgctcctgaatgagcaggttctaacatcttccaaacacttcatctcccccacctgcctatagtcaccgcttggtggatttttaccactgcaatgtgggccttggcttcctatttcagaccccctgggatgttttggtagcttccttaggggtcttttcaactccaggccctccctctgcccaaccatccttcaaactgcctccagatgcaacttcctggagtgcggctttgcttccatcgctccctagctacagacatcctgtgggcttcctgtttctactgaatccagggcacatcccccagcctaggattcacaatctctactggggacaggggcattgcctctccagtccgattccccaggacttgtgctttttttttttttttttttttgagacggagtctagctctgttgctcaggctggagcacggtggcgcaatcttggctcactgcaagctccgcctcctgggttcacgccattctcctgcctcagcctcccgagtagctgggaccacaggcgcccgccaccatgcccggttaattttttgtatttttagtagagacagggtttcaccatgttagccaggatggtcttgatctcctgacttcgtgatccgccctcctcggcctcccaaagtgctgggattacaggcgtgagcaaccgcgcccggcctgtctgggccatctttatactcagtataatcagtccccacaaacagaaatgctgttgcagggtgagtgtgctaaaaatactcctgggatttttcaagtccttggagacatccatcttaaaatagtgcaaaaagaaccgaataaatactcatttatgtgctattttaatgaacaactgcaggcaatatgcctaatatggcagggaggtcttcagtgtcctttctccttcattcttgattagcgtctgagctcagatggcatgcatcagtatgtttgtggcattacagaggtgctgggagtgagggagagtgcaggggtagggaagcattacatgcctgtaatcccagctatttgggatgctgaggcatgagaatcgcttgaactcaagagggagaggttgcagtgagccaagatcatgccactgcaccccagcctgggccacagagcgagactctgtcccaaaaataaagaaaagtcagcttctgtgctcctgcccagaaccactgaatcagatgctgggtgtcagctctggaccctgtttggccttttctttcctatgtcaacccagcagagctgcaggccttgtgtggaggtgggttacaatgtgctctccttatccccagtaaaaccaggacattttaaggtggggacggggtgggagtggatcaattaacttggagtcttggcttgacctttaccctggatttatggggcttagaaataaagggaaagttgcattcttctctgaggaactgcttaattcatatccactctcccaaataaagctgctggttgactgcagctatttaattcagtgctatttgctttcattctgtatagggtgaggatagcttctgttggccagagcttgtgctagatctccacctgggtcaggaaggcatttccctgcgctcacaaaggccttgcacacataagatgcactgaagaattcctggcagggccaaatctggtgtccggttcactcttggccttccaagttcttgctgcctctcctttgtacccatgatatctgatggcagcagcatggaacttggtacagttgaaatagcccaagttcaaatcctgactcagatactaagctcagtaactttacgtaagtagcataattatatggatcctcccttcttcatctataaaatgatgtggtgaactgattacaggaatggccctaattcttcactcattccctgtatctcattctggactgactgtgtctcataagctgttagtaaacatgacgcaagctgagattttttttttttttttttttttaagacagagtcccgctctgtggcccaggctggagtgcagtggcctgatcttggctcactgcaaactccacctcctgggttcaagcaattctcttgcctcagcctcccatgtatctgggattacaggagtgcaccaccacacctggctaatttttgttatttttagtagagacagagtttcaccatgttggctaggctgatctcaaactcctgacctcaggtgatctgcctgccttggcctcccaaagtgctggaattataggcatgagccactgtatccggctgcaagctgagctttgaaatactgtttccatttccactgttgaatctcttttatcaccatgaaaagagatttcagggctagtcactggttccgggagaagaaagaatgacacatagaacataactcaggtgctctaatggtcccagttgacaccaacctagatcagttgacagccagccaactcctagacctccatgtgagcccagccaagatcaccaaagctacctacttgaccacgcagatatatggacacttagtgcttatgccactgagctcgttgtgcaccattgttttggtaataggtacagtgggaaactcagtaataactattactattacaatagtaataactattggattcaaatcctgccagggcatgggttggttagtgctacatgcattgcctgatacatcaactacttttggaatgactgaatggtcttataaggataaattatgtaactcttttgcacctgatttctctattcagaacatctctagtaggctgcaatcactgccactcacttgaaattctttaagagtggaaatgccatttgctggacattcagagagagagacgtgaagtagctaggttcctagttttacgtgagatgtcgattgatctacggagtaatttgggtccctggctccaaggcaagcctgttacattcttcaaggagaaaacagcttgacatcagtatcagtttgagaacacagcatgagtgaacaaaaaaaacagcggtccccatattttgggcatttgctctacgccaggcacttcttatctattctgcgtggaggaattgctctcctgatttttaaaggggacaaaacagctcagagacatcaaatagatgatcagagagcacacagctaaggaggtaacagctcaaacttctagatccagagctacctcacagcaaaggacagcctcttacaccccaccaccgtctgcagagcccacagcaggcatccaggtgaagctcctcagtttatcaatgaaggaattgcacctgtgaatggaagtggcctgccgaaggctacacggcagtgagtgtaaccagattacctgataccccttccagggcccttggtgtgacttattgagatctcatgggccagtgggtgtcactgaaattcctggataaaagttgcttgtggagggctgtcatagtggctcatgcctgtaatcccagcatttcggggagcaatttgggaggccaaggcaggtggatggtttgagcccaggaattccagatcagcctgggcaacatggtgagaccctgtttctacaaaaaaaataacggaaattagcctagtttggtggtgcatgcctgtagtcccagctgctcaggaggctaaggtgggaggatcacctgagcccaggaaggtccaggctgcagcaagccatgattgtgtcactgcactccagcctgggtgacagagtaagaccctgtctcaaaaaaaaaaagtttcccatggagacattatcagtttctaggcctccacgtgagcaccttaaaagaagcactatggtttaacaacaacaacaaaagacacaccagggaacacctgagctgctcctatgcgcctgtgctgtcttcagggaagcaagtcagcatcatgaggaggatgccttttgggaagaggcctgagggctggctagctgcaggtgtgccatctctaatcaattcattcattcattcatttatttttatagaggtggggtctcgctatgttgaccaggctgatcttaaactcctggcctcaagtgatcccatcttggcctctcaaagtgttgggattacaggcgtgagccactgtgcccagccccagacatgccatttctagacaacacctccaaggatctgaggagagaagcccctcatgctggctgccccggcatctacctatccttcgttctgcctgccagctcagagggtgggagcggtgccagggagctgtttgggctggcgcaggccaggcaggagccctacttggctagcagccccaggcacctgccacacttgtgtatttgctcagcggttcggggtacggaagcaggatgccttccgtcattgcaccctgggtgttcggggcctcgggggccagctgctgggctggcagcttctctgaggagctgtttcttgccctctttgtacccctgtctctcaactacctgtcaggcaggtaataatcccaccatcacctgatgtacccagaggagaaggcaggaggcctgcgcaatgtgcacagaacaaacactggcaaggtgcctgagagccctgcaccaggcaccttcagccctcaggggagagagtctcctgtccagctcaccccaggcacccttctccaaatgcccagtcttgcaccattcccagaccatttgggccacatctgaaagaatttgccatactgcctgcctttgattagatgttagggaagatttaaattcgtgcagaatctcaatacagctcccttcctgttggaaccatgtgacagactatttccaaggctgtttcttacaagaggatctgccttactaagtcagagcattgcaataattaacgttttgaaagctccctgatttccaaagcattttcacatacattagctcacttaaggtctcccaaaccctgtgaatggagcattctttttagccccattttacaggtgaggcaactgaggccaagagagcttgagtagctcccccagtggcttaatgtagaataagtatcagagcagagactggagcccagatcttccttatgagaatccagcctcctttttttttttttcttttgagacagactcttgctctgttgtccaggccggagtgcaatgttgtgatctcagctcactgcaacctccgcctccagggttcaagtgattctcctgccagagtagctgggattacaggtgtgcactaccacacccagctaatttttgcaattttagtagagatgaggtttcaccatgttggccaggctggtctcaaactcctgacctcaagtgatccatctgcctcagcctcccaaagtgctgggattacaggcgtgagccaccgcacccagtcccagccttctttctgattcactcttgttttgtagttgtggacatttaagaagactttttatttttttatttgtatttttttttttattcaaagggcttgtgctcaaataaagtgagagtagggagagagaaattcatgtttctctgctctgttttttgtttgggctctcatttaatctctctgacaaccttttgcagcaggtgttattctcatccatatttacacctgaggaagctgaggctcacagaggagaaatatctttccccaagccccacgtcgagcagtgggtagaaaatgagcccagatccctctgtctccatctctgcaacctgtctctctgcatgccacattggcttacgaccgagatcagctgcaccagggcaggctggagggtgaggaggctggctagacccctgggaaggcaggcagcacccagagctgttccagctctgctgatcctgttcgagaggccagaaaagttcaaatattggccttctccttatagtctcccacctaccctccctctggaagcacagaactgtagtgtgcaaagaaagaccttgtggatcctctgctcttgccctctcatttaccaaatgagaagacgctctctggggaacgtgaccggcctcattccatagaagagatggaagagtctggagcagaatctgggaccctgactcccaggcctgtgcactgaggcgttcttgtctgccacctcccagcccctctctttgccttcctcgatcttcttgagttctctaatgggtcatctgttgtgaccgttgattacaagacaccatgcatggttcccctgcttccatttatgtgtggatctccctctgttcttacataagaatctcagagatgggtcaggttgtgaccttctctttggtgctggcttgaagttgaggaaaaagccaggctccgagtcccttggatctgggtcccaaccctgcctgtgtggctctgaagtcaagtgactcctcctccccctgttgtattccccggcagcactaacagtggctccccttagctggacacctagagtgccaggctctgtgctcaggacttcactgtttgaggtccctggagagtggaacctctcacccacaaggtggtgattcccttgggagtgggcagcatgcagtcagaagggaacttgggtggggacaggcatcctatatcctgggtttacccactcctacccatgcactgatgggcttgactgcctggccaacacttactgagcatatagtgaatgacgggcactgaggctcaggggatgaagccataggctttgagtcccagagtcagtgatggaatcaccagggagcccaggcatcgtgtctatgctctgtgccatgtgacaagtctctgccttctcttcatcctgaagagaccctgggttcttgcctccctgggctgtggcaccatgcaaggtggccaaggtaggggccctggtgttctggcccccagctaggttctcagcactactgagtgctggctcatggtgagtgttcagccactgttggatgaatggagaaatgactcaatgaatttcccagaatgcacagatgctgcacctaatcccttggagtttaaccagcacaagagtttgcactttgctggccatctcctgccaaggcacagccttccctgagcctgtttcccttgtatgtggctcatacctgaggcccccagctggcatttggtcccctcctgcaggcgtaggctgcccagtgccaagtgcaccttgcatctctccccagtcctcccactgctgtctcccgcttcctgccctccgtcccgccacgggctcccgccaaaccagcccacacggcctccttttgttcagccacctcggtttcaggccaaccagtccagccaggtcccccagcctgcattgcacactcctttgaagccttgacaggcagccaaccaagctggcccgagcgcgcaaggcagggtgctggtgccggcgcgctggcagctgcttcccgcctttctggctcctgggacctggctgctcccaggcccattcacatggggacagaaatgcctggacgttctcctcggctggcatgggtattgcgtccagggccacaggctggggctgttcccacagcccagagtcctttcccaggctccctgttctccatagtgaagccctctggtttgtcccaggcagtgcatcccacagcctctgtctccacaaaggagaactggcagcaggaatagcctggctgggttctgagctctctgaggagaggcaggactgggcaaagggtaggagcactggctttggcttcagatgagtgtcgagcgcctcactctgccatctctagctagggacctatctgcttcatgcctcagttttctcttctgtaagtggggagcatagagcacccagttcaccggcacagtgaagggtgatgaatactgtaggttagcacattgcaagctaagtcttcaacaggagttgtggggagcactgttaatatgtgggggatcatcattctagtagctgaggagcatcggagcctaaaagactcgtgtgaaagaggggtctcctgttcctatttttaaatttttaaatgttattttttattattttggggacagggtcttgctctgtcacccaggctggaatgcagtgatgtgacctcagctcactgcagccttgacctcctgggctcaagcaatcctcccacctcagcctcccaagtagttgggactacaggcacataccactgcacctggctaatttttttattttttatagagatggggtcttactatgttgcccaggctggcctcaaactcctggactcaggtaatcctcccaccttagcctcccaagcagctcttgggactacagcaccaccaccatggctggctaattttttatttgattttattttttgtagagtgcagtggctctatcactgcttactgcagccttggcttcccaagctcaagcaatcctcctacctcagccttccaagtagctgggaccacaggtgcacaccaccaccctcagttaattttttgactttttttttgcaggaaacgaggtctcactatgttgcccaggctggtctcgaactcctgggctcaagcaacctgcctacctcatcctcccaatgtgctgggattacaggtgtgagccattgtgcctggcctcctattttctaaatttcaaaagtagtacatgctgactgcacaatttaagaaatttagataagtgaaagaaaacttaaaaaatacttgttgcggtcgggtgcggtggctcacgcctgtaatcccagcactttgggaggccgaggcaggtggatcatgaggttaggagttcaaggccagcctgaccaacatggtgaaacaccgtctttactaaaaatacaaaaattagctgagcgtggtggcgctaaccttagtcccagctactcgggaggctgaggcaggagaatcacttgaacccaggaggtggaggttgcagtgagccgagatcgcgccactgcactccagcctgggcaacagagggagactctgtctcaaaaacaaacaaacaaaaaaacacttgttgctgggtgctgtggcttgcgcctctaatcccagcattttgggaggttgagatgggaggattgcttgagcccagcagcttgagaccagcctgagcaacagagtgacatcttgtctttataaaaattttttttaaaaaattagctggacatggtggtgggcacctgcagtttcagctacttggtggctgaagaggaaggatcacttgagcctgggagttagaggctgcggtgagttgtgactgtgtcagtgcactccagcttgggtgacagaatgagatgccatcttaagaaaaagaaaaattaaaaaaacctttttatcctaccaacgtatatactcatgtgtgcacatgtacatatgtatgcatacccctacacacactagaattgctagtttattaccatgtgtaataatagtttatatggacataacagtgcatgcctattatattatgtacatatgtaatgcattttatatacttttcatatatatttcatttcatattaaattcttgcatatacatatatttgaaaaagtaaagaataggttcctctggttttgtaaccagcttttgtcatttaatgtaagttgaattttttttctgttagggaatttttctgcaggaaaatattttaaggccacctggtatgttataatacaaacatgttatatccatttgacagttgaggagctggaagtgctgagatgcaacataagttccccaaaattatgctacttgaggcacagctgacatccagaagcttctctgggaaggcttttggagttccccaaggcagagtcaacaagaacataagtttcttaagaacagggactgtgtgcctcacttactgtcatctccccagcatctgccacaaagtggacattctgttaatagttactgagtgaatagacacaggaagttcagtcttcttttttatctcatttcttgctcaaagctcatctcagcattgaacgtgtctttccacatggcctcctcactagcttctgtacccctcaagtccaggaccatgtcagattgtctttgaatccctcagccccagtcccaggcctgccctagagcaggtgttcagtaaatgactatcgaattgtggaaacagggatctctccatcctggattcaagacagcgccctccctatgaagcttttctgagctctttcacaccaaagttctcccaaccatcgtgttgacagctatctgcctgctgccctcagtccaggagcaacttggacatcagctctgcctgtcacactggggtcggcgcacctggcctgttccaggacagatcacaaggctgagggttaagtaacacctggagtggttaggaggctgggcacctccttgtgaatctcccgggctgcgtggcgggtggcgggtggctggcaggggagggacccttggcactgctgtggctttgtatttgctgccagcggggcctttgatgccccaggggctgctcgcccagccaagggcattgtagaacacaaaagctgcagaaagcagcacaaataaagtgaaagcgacccaggaaactgccagggagcttatcagcctgtttcctgatcataggtatggggtgtagggaggcacggggagcatttctgggcccggtgattgcctgcacgttgccagggcccctggtattgcgtacaaagcattaacctggaagctaagcaaggctcttcaccttgtaaaactgactggatgagtccaaactcttagagtttttgtgaggattagacaggtcgataagttaaagtgcctactctgtgtgtgtgcatctgataatgataacagtgacagtagtaataacggtagcagctaatactttctgagcatttcatatatgccaaacactgttttaactgatttttatattaattcatttaatcttcataatgacactaagaggtaggtagtactgttatcttcattttataaatgagaaaatcgaagctcagagatgttaagtaactttcttaagatctcacagcacatgagaagacaatccggcgtttgaacccggggctctggttgtgaaacactggtccaccttgctccccatttcttccccctagcctttggaatattgtgttcccctaattattatgataggacaaccatgtcgtgatgatgatgatgacgacgatgacagcgatggcggtggtgaaagaggaagacatcccttcatttcatgtagcaatctgcttcttgctgggatttcaaatccattttcattgttgatcctgagaacaagccttggaggcggaatcattttgaaatcccaggaaaccgggccttaagagacggctgaagacccgagcagtcattcggtggagtctgtgaggcccagagctgaggaggaggacatgggtgtagaaacggtcgcagcccacactgctgtgcctacagctctggatcctgactgtgtgagtgggcccagggctgctggaacctgtggagctatagcaagaagggtgaggaggttgccccactcctgcttccttcatgaacttcgttgttccctcaggacaggaaacttaggctgttccgttgacctctccagacagcttagtggtgatctcaagccttcttatgagatggtggatcacagctaccattcattgagttaagaccttcatttatttcatttcatctcatcagtagccctgggatatgcatattatatttccatcatggtgtaccataattgcgtcagttaatttttgccacggcaatgccaagtaacaaactgcagaatctcagtggctttcaatattaagcatttattatctacatatctggggagattggccaagcagccctgctgatcttggctggactgcctccatgtctagggtgtggctgcctggtggctgatgtgattttgctggagtggctggggtgtctccactctgccctctgtgtctttcgtctccttctgaaaccagcagactagctgggggaatgtcgttcttatggtgaaaagcacagagcaagacaagaccactcctaggtgagtaagccctttccaagcttctgctggcctctcttttgctagcactccattggctgaggcgagtgacctcaccacactgagtgtcggagtgggaaggcactgcagaggtgcatggtggagggtgagggtgcaggtagggtgaagagtcacccttcaggtaagggtgcaggtagggtgaagacctgtttgcacttgatcacaggtgatgtcatctcaactgtccctcaggcttctctgagctttgctgtcgtccttacttaaaactatttgcattgttagaaagaagaagagactagcaggcacctagcagtgactgaatacccaacaatccacttaaggagatgaatggtatgattctccgaggctctgtgggaccacggggctttatcaaggttgcctaacagagcagtggctcagccagcattgaaatgtcacctgcctggttcccatgtgtgtgtgcatgtgtgtgtgtatgtatgtgtgtgtgtgaacccaaacctgtgcccaagtcagacttatgtgactcttgcagccagttctccctcacagtgttgcttggaaggaaactggaaggaaaagaagctttaggagagagaaattgtgacctcctttccgcaggttgctatcgccacaggctttccacaagcttctccctgggcggccaccccagaggctagaacatagcagaggatttttcgtaaaatctttggagtcttcagaagaaggtcttttgagataggtcatggagaaatgaggcctttgagccataaattggccatagtgtgcaggctggggcctcaccagttcagcgaaatctccagccttgagaactgaaactgacttggggctctgattttaacaatggccttgaagtaaggcattcctccttgtgtagttggagctgcttcccctcctcctttgttccccttcaccatggcatagccccagggagtcccgatgccaaattcagtctttggcctgtatcctgaagtcaattcccttaggaatacttttcttcacttgcctgcctgaggcccctctccacacttttgcttgctttcccatgttaagaagacgtatttgaaagtgattcctgggtggccagagtcagaaggctgggcaaccatctgccttgccggccacctccccagccctgccgagctgtgagcttacaggtggtaccatctgcacttctgcacctttttttttttttttggccctgacctttggcctaataaaagcaaagtgcagagctttgaatgagggagatagaaacaagatgttctctacctcccccaccccctcttttctctcctccttctcctcctcctcttcttcctctttccttctctacacttagtctgtgccaaacataaatccagggatgtatttatttttcccagtgaactaaaggtttataaggaggatgcccttttctctgcaaggactggtattctcttcccttggaaaactcctgttcatccttctggatctgggggaagaaacccatttccctcaagactgttctcaccacctgggtggagttgctgactttccattttggaacattacacttccagggcttcgctctggtccagaatacacttactgtgctgttctagctcatctcttggtgtgcgtgtcaactgaaccatttgaaggggatgactgtggctcctttacttatctctgtgtcctctgtgcccactacagggtcaaacacagcatggaagctaaacatacatgtgcaaaatggacaaatgtaggtacaagcaggggcacccttagttcagaagggagcttgggctccagatcacttagctctaacttggaagctggaacacctggctctgttacacagacaagacctgtgtctccatatatacaatttattcctcacacttggcaaatgtgtgccgaagctgaaagagctcaaccttagagtttgacaggttcaggtttgaatccctgctctgccttttcccaagcaggggactttgagtaaatgacttcactgctgcctttgccacagtttccccatctgtaaaataaacatagaaacacttgctttgcctgatttgttgaaaagaatagagatgatgtttgcaaagtcctggcatgagcagtagctattatggctattttatttaccctgaaaagcaactgttcatagtatcacaaggcaggcaggggtagggggcaataaaagcatttgtggcaaggatccagttatttgcaggcttctcttctgtctggctttgtttactgtcatgcaggaaaagtgccttcaccagggcacagcagtaaacctgttggctactctagtcctgcctgggttcccaggaaattggcatgagaggagctgcctgctgcttgtgggcctgctatttaggctgcaatagctgtgggaacacacagggttaggaaaacaaacacatgactcattggggacttccgacctcaagccaatgaggtgctgactccttgcaatttctaagggttcccagtacatatgtatatgtctgctcagccttccttggacctgagcccatctgtctctgctctcacactttgtggggggccaagggatggaatgcttgtgttcctacccttcatccctccttctgcgtttattgagccttgctaggtgctgggaatgtgatgacgagtaagacagtgcagggtacagacaagtcaacacatgtggtctgctggacagcagccccccaagatgaccataatccctgggaccttcgactgttatctcacatggcaaaaaggactttgcagatgtgattaaattaaggatcttgagatgggaagagtgctgaattactcaggtggacccaaagcaatcacaaatagttacttattagtggttccttattagagggaggcagagggagactgaataccctagaggaggagatatgaccatggaagcagagattgtagtgatgcagccaggagccaagaaatgctggcagcctctagaagtggaagacaagaaactgattttcctttggagctccagaaggacccagccctgctgatgccttgcttttagttccttatgacttagttcagcctctgacctccagaagggtaagaggataaatttgtgttgttattagctgccaagtttgcgatgatttgttacagcagcgagaggaactaatacaatgtgtccttgcagtattctaagtgttaacaccacttccctagtgatgaaggagactgaatggctcagtggttccgaggtagatccctggagtcccagtgctttggttcaagttcacgttcaccttttgttagttaaggggccttttgccatgttacttctcaaagccccaggtttgtctgtcatctgatgtaacatcatgatgtaaaataagggtaatagtgatttccatctcatgcatggtggtgaggattgagctgtgaaatgcacttgaagatggctgtctggagcacagtatgtaccccagcaccttcctcccgtgccttacctcttgtacctcgtcatcgacaggaaggcactggatgctggagaacctctccacagggatgtcacaatgcagggcaatgtctgcagaggtgttctgggctgaggcttctggataggattgataggacatttagtagttagcagtgggaggaggcaggggtgcccgagacccagcgcttctggggggctgggcactgtgctgggccctcagtagtttagtggctattctgaaacagtcactcactcctgatcctcccgtcactgcagttcacaggcagccttagttttacctctgtaagctactcatgagcatacatcattcttttatttagtaaatgggaatcttgcccctgtcatgtacctgtcaggcattgcaggagtgagtggaagctgctgcagggttaccgcacctgggttttgccagaaaggtaatagaaggctgtcaaagcagctcctggaggacagttgagcaagtgactgttagagaaacctgaggcttcgttagggccaggacttggctgcagggtgctgttccattcctgcctgcctctgctgcattgaggatgcagcctccaggcccaccatgggtttgggctccttccctgggacatttgggatgattttgatgcataacttgctgttgagattctcaccaaatagctgcctgggcccctctcctcctgaccagtcagccaccgccactgccactgccagaggtccacagatggaagctcccccaggcagtgggaagaggcaggggtgcccgagacccagcacttctggggaagttgggcactgtgctggggccttaggccctgcagtcaccactcctctgaggggcaggagccactgggtccattttacagtctcctcacctgtctttcagttggtgatgggacatacgcccatttgttttcattttgcatgtatgttcagaggggagtaatcattatcactgcttccaattctataatttatgtgtttaatggatttttcaggtgtgggtttgggggagcttgctttgattcgctatagagaatgttcttttccccacctggaaatgcagttgtcattgttattgtgttgttgcactttgtttgcattcctgaggccgtgtcggcaacaggcttggaaagggaagtgggggacagccttgaagcatctggcctgtaagtacagtccatttggagggaggatctcaatgcattttttagcataaatacacgctaggctagctgtgcccacagacagaggaggtacccaaccctcccacgttctctgcccttgctgagaagcctgggttctgaaccccaggcctccgtgggacacagagcttctcaggagcacacgaagctcagtctctgcccctgccttccaggtaaacacaaatgctgctcgcgttggtggcttagagcccagcagcacatttagttcagtgcctttcctgggcttggtgggcaggtgagggtgcaaagtcacccttgatgaagaaccactggtgtagactagtggttcccaacatttgctataccagaaatcccttttactggttctccttccctgtgagggagtttatcaaccaaataaacttcattgttaagtatttattcctctactttcttatctaaaaatatctgccagtgggagttcctgatctgggtcaccaggctgagttgatataattctggccagtatcgaacaaagaagcttgatattttaggtgacaaccgtggtcttattggaaaggaaggtgaaatttctggtagacttcttgacccttcgaaaaatagactgaggacccccgtggaggagtcctgagattggaatcgctggtataaacttttattttgctgtttggaattaagaatttggatcaaatgttgatggaaggtttctttgagctccacatttccctgggagcctccatcctgtcttgtccccttttagcatgagcagtgtcattattcagcatgtatttagtcagtgatcgccacatgcctggcacttccctgggtgtgaggttgccgcggtgaacagcagatgcagacatggtactaatggggtctgtagccaagtgagggaggctaagaaagaaagaatgtcatttccagcagtgataagtcctaagagggaggtgcggcacgtgaatgggcttgagggtgctggcctctggagtaacaagcctctgtaaataatcaagtcacccatatcccagccctgccctgaagcacagtcttcacttggcctgtttaggatcatttcacagattcattgacagggcccagttcctgctagttgactccttggggacggaatcctctattgcttgcaaaaatatgctctgcagtaggctgtgtcttgctaattgagagggattctgagaagtggagcagccctgcctcactagattcagtaagaggaggccttataggtacgttgaatctggcctggtggacaaagcaccctgctgagagctgggcaggtcttcggaaggagatttaatgttcttcagtaggaaacatggtaattcctctctccctctccagatgtctgcaaccaagtcattataacacagaagggaccttgcagccattgtgtctttgtgctcaggtactgtctgagggagggaagggaggcagaaggaaggggagggacggatcagctccatttgctgagccaacctactcagcaccaggtgcccctcctcttggccactggaaggctttctttcttctggccacaatcaaacaccgtttcttctttctgccttggttccctgtgagtcaatgactgttgccgtgggaaatagtagctgcttggcaggggagttcatgaaggttgcagagcacctgctcaggttcttgcctcgcctcccttccccctttcctccctcctcccacctttccttacctggcagctacctaattcttctctttcaaaatacagttcagagaacaatccacaccagctggttggggaatcatccaaagagacaatttctaccctgtgcccacctctcctctagttaacacctttcagtgttccctcccttcctgttgtccttaagttaatgccctaaagtcatggcccttgctcagcctctaaggccctggtgggtgctgcttccccttgtagctgggtgggtttcaggaaatgccccatctggtcatgagagataggcagccatacctcaggggagatggtggctggggagacagtctagccacaaagagcaaaaaagatagggatgagatggctcagagggagtcttggtaaggactttggctctttctctgttgagatgggaccatcggaaactttttggcaggttctgatttgcattttaatgagatccttctggctgctgtgttgaaagtggactggaagtggcaaagatggaaagacagaccaatcaggaggctattgtggtaatccagggtattgcagtaatcctggcctggtggaagcagaggagattgtgagacatgatcagattcagaatatatctcaaaggtaggatttgctggtggattggctatggggtgccgtaagaaatatgatcccgattgttgattatcctgtgcaactacagaatgaagtttccatttattgatatgggccaatcctcagggtgagcaggagtgcctatttgtttttttgtggatagaggtggaattgttatgttagagatgttggtcagacatccaagtggagacagtaaggaggcagctgcatgtacagatccagagtgtccacttggccaggccatggtactcagacatgtgatcaaataccagttgagatgtcacatggagtacgttttgaatgaggttaacatttaaatcagtagactttgaggaaaggacattaccctccacaatgtgaatgggcctcatccaatagttgaaggctttaagagtaaaaagactgaggaaatgggaagtgggaattctgaccccacattgcctttggactcaagccgcagtatcagctcttcctaggggctccagcttgctggcctgccctgcagagtttggacttgccagcccccataatcacacgagccaactccttaaaatctctctctttctgtctctctcttcaacatacacacatcctactgattctgtttttctggaaaatcctaacacatggaagaaagggataaatttggatatccaaaatttatgcaaaaatggatattctgatttgtatttgggacttaagttatttaagccttaaatatgagcgtgatcatcaagagacaattgtgggcagagaggagccagtccatggggccgcacagcacagattaagagattcagaaattatgtgtgtatgtttgtgtgtgttatatgtgtttgggtgtgagtgcttgtgtgtgtgtatgtgtttttgtgcttttgtgtgtgtgtgcttgtgtttgagtgcttctgtgtgttgtttgtgcttgtgtgtttgtgtatgtacatttgtgcttgtgtatttgtatgtgtattgtttacgtgcatgtgtttgtgtgtatatgtttgtgcatgtgtgcatatgtgtgtgtgcttgtatatgtgtgtgttttctgcttgggtgtgtttgtgtgcatatgtttgtgtgtgcttgtgtgtgtttatgcttttgtgtttctgtgtgctttgtgctcgtgtgtgttgagtgcctgtgtgtttgtgtgttttgtgcttgtgtgtatttgtgcatatgtttgtgtgtgcttgtgtgtgattgtgtgtatatgtttgtgcatgtgtgtgcatgtgtgtttctgcttgtatgtgtgtttctgcatgtgtttgtgttttgtgcttgtgttcgtgtgtttgcatgtgtgtttgtgtgtgtgcatgtgtgtgtgttgtttgtgtgtgtgtttgtgcatgtgtgtgcatctgtgtgtttatgcttgtatgtttgtgttgtgctcatgtttgtgcatgtgtgtgcatctgtgtttatgcttgtatgtgttgtgctcatgtgttgtttgtgtttgtgtgcatatgtgtatgtgtgtgtttgtgtgcatgtgtgtttgtgctcgtgtgtttgtgtgcatgtgtatgtgtttggcgtgtatatgtgtttggtgtgtgtgcctggtgcgtatgtgtttggtatgtgtgtgtgtgtgtatgcatgtgtgttgtgtacgtgtgtgtgcttggtgaatgtatgtgtgtattttgtgtgtgtgtttgtgtgtgtttgcgtgtgtgtacatgtgtttggtgtgtgtgtgtgtgttgtgtgcatgtgtggtgaatgtgtgtgtattttgtgagtgcgtgttgttcgtgtgtgtttgtgtgtgtgttgttcgtgtgtgcatgtgtttagtatgtgtgtgtttgtattggttgctgagcacttgctatgtgtcaagcatcccctattactagatgcagcctctccttaaaacagtttggatgtcatcatggagagccatctatctccttactttttctggaagtttgggaagggattctcatgggccacctatgtatttgactgatgctttgcagttcctgtatcacagtccctccagtgttctgggcagcagactggcatccagccattccttctcctgtgtcagaaattgattattctggcatcttccttccatgccattttcagttcccctaacctccagtctcttgaagccatttagcatctcttggtactgagtaatcccgtttattaaagcatgtgaagcttccttaatggcaagtgttggtacaaatagttttgcagccccaagggacagggtcatttgaactcggtgactggaaaaatggttggtgtgaataatgtgaagtgcaggaccatggtgatgaatttccttcaccctctttgttccttgttttctttgtaaggcagaatgtttaacccatattttccaagaactgtgtaggtgggttgctggggacaattgatttttagagaagtattatttctctggatgtagaaaccaagaagcaaagaataatattgagcaagagtcctcctgatgaccaggcctgggctaattatggcgatagtgttgcaatgtgtttggaccatcatacagtataagaacaccacttccccccaagatgtgcaggacacaggatactccccagggccttgctctagccccatgtcacccaatgtcaagtggatcagctactttctaagactgtaattggtcctgaagaagaaggagtggagcctggcaggaggaagggacacaggtctttgtgtgaggaatactaactggtaatggtagttctggtactgccctggcttgctgtgtgagccttctcacctgtatgagcagtgggatcaccatctatgaggagattggactaggtggtttattttattttattttattttattttattttattttattttattttaagagagatcttgctctgtcacccaggctggagtgcagtggcacaatcttggctcactgcaacctctgcctcctgggttcaggcaattctcatgcctcagcctcccaagtagctgggattacaggcttgcaccaccacacctggctaatttttgtatttttagtagagacagggtttcaccatgttggccaggctggtctcgaactcctggcctcaggtgatccgcctgcctcagcctcccaaagtgctaggatcacaggcgtgagccactgtgctcagccttggactaggtgctttctaaggagtggggatgggtcaatgggagggtgccttccctaaataaaggggccagccctccattagcatccacttaatgttgtattgtgggagggtgcattcagtgctgccaaattaatttttggactttgaatataatgaaaatttctgaattttggatgtaggcaataacttcaaaaatatttgaaacaccctgtgggttagatctgtagctggataaagccccctaggacttcacgttgcaactcagcattcctgaattgctctccatggcttctcacaggctgggggtcaggaggtgagggaagctcttttgatttgttttgttttgaaatcagtgtaagtatcttcaaggaactaagagaacaaaatcagactggaagctgggtcacaagatgctgttgcctagagacttagacagagggcatggcattcgctcgctcatagaaggagatggcctacggcaggagcctcagcagcccatccccctgggattgatccctgtgtcctccacctgctgtctctggctctgtggactccatggcattcagagctgggggaaatcaagtatttcaacatcttaattttttcagtcgataattatattttggagatctttgtgtgtccgtatgtgtgtgtacacatacattattttttaactgctatatagtattattttcccaaactatttcctacacacacacacacacacacacacacacacatacacaaggaggccaaacatcttgtcttttttttttttttttttttaaagacagggtcttgctctgtcatccaggctggagtgcagtggtgcaatcacggcagccttgacctcctgagctcaagtggtcctcctgcctcagcctcccaagtagctgggactacagacatgcaccatcacacccggttaatttttttattattatttatttatttttttttttttttgtagagaaggggtctcactatgttgctcaggctggtgtcaacctcctggtctcaagtgatcctgctgcccaggctcccaaagtgttgagactacaggtatgagtcaccgcacctagccccaaacatcttattggacaagcctttcttggccactctatgcagacagcacccacctcgcacctccatctcccctttttttttctatcttaattgatcaccatagcacctatcatcatctgacccagcatatagttacttgtttatttgtttgttgacagtctgacacccccaacccctcatgaaccccaggaatgcagagacttctgttaattttattaagtgctttattccctggaaaatggtaagtgcctactaaatatttgttaaatgcataagtctctattttggagatgacctccacacccagcctcaggcacagagatgtaaagtaacttactcaaaatcacccagctactgacaggcaaatctgggcccagagcccatgctctaatctaaatcattactacctccctgctggtaacaaacaaaacctcagcacagtgcctgcaacacagtaaggactcagtaaatgttaaataaaggtaataatgcttataacaaccatctttgcccccagaaagatccttaccttgaggagatagcaaggatttgagatgttcaatataaaataccaagtatggtgcctgtgcatagttggccatcaatgagtggtggctatttactattatacttgttattttattatactttagcacattgtgttgtacttaaataccacttgtttgccctacttatctttgtccctcctgagggtgcggagtgagccttattcattccagcattcctacaatcttgtacatccatacaattcttgatatgtagttgacatacactactgtaaggtacatgaatgagtaagtagataaaggaatgaacaaatggaccagtggtttgttggggccactctggccagtggtttggggacatgcttcctggagtcttatcccctcttgtcagattcaggtttaggacaacggtacagttgttccattgttcccagataacatatcctatcttaacgtctttgctggggcagcccttggacacaccctgagctcctgccctatcactggccccacttgtaccccttgtgggcaggcaccacggcagcctgctctgaagggagctttcatgtggccgaccaactctactccttgactcctcccttctctcattgaaaaaaaatgtttaaggggacatttctctctcctaaactttttatgttccattgaagacctggaaaacatgttaaataaaaatgctttgccacagctgacctatgtcttctggcttgtaccccacaacatcttatctaatgggtaagtcagttcttatctttatttcactactgaagaaactgatgcataagtgttatatgctttttaagttacgtagtattagtgaaagagcctagggccagaaccagctgtctgcacgcaacccaatgctttttccacaagagttacccacatggctgtatttgttggtattttctacccttacctgcttccagaagactttggaagggtgtgttacaaaagcagtgatccagggcaactttcaagtctgttagctccttgtgacaaccgagctgccctgtaaggcgtaatgaggagcggcttcataatgagctgaagtagttctgcagatgacactgctcaaggatggggatgctttcctctctgccatgttttcctttcctgttggatttgactcttagatcagttgttctaagactgggttgaagcttggaattgcctagaggattttttaaatcctgctgctagtaccccagctgcaaagattttgattttgtctgaaatgggacctgggcatttggatttataacatctccccaggtgattctattatgcagtggagtttgaggaccacagtcttagagcatccctgttatagggattctggggactaacaagaagctacagaccccaaactatttcagatgtagttccagccctcctaagcaagtgttagctcgaaccttctcactcttgctcagattcatagctgctcacctttcagaagaaatgacaatgctgaaagaggaaaccaaggggacaagagagatggcagccatcccaacagctgtcttgtgttgtgcccctactgtgtgccagacactgtcctaagcactttacttatattaactcatccagctcacaaccaacaaaatggccctaagaggcctctgctgatatccccgttttccaaatgagaaaactgtccacggggtcggtcagtaacttgttcaacctgggaatggcagagctgggatctgaagtccgggagcctggctccgtaggcctctgtttaagccactgcatctgttgccttgtggaatgttcttagaactgtaggatactggttcccacatggccgagagtcttctctcactagttcgtgctccatggtgatggagaagcatagttctaatctgtcattctgttgctctggagcctacacagccccccatcgcatctggagggagaagcccagctccttagcacagcacctgagaaataccctttacagtctggccactggctgaacattctttcactctccatgccacactgctctgtgagtaccatctgaaggtcctctcccttttctctgtcttctaaatgttcactcttcaatatctaactcaaatatcctcttctctaacttgtccaggaagaatgagtaaggccctttcctttgttccccaggctcttagtttctccatctctaatcacgtagattacagccctttctttggttttctccaggggaccaaggagtggggctctgcctttctcatgtctgctctgccttcacggtcccccacagtgtcttcagtggatggccaacctctcatgaacaggatgtcctcttgtctgaggttctactttgttccagccatggagtcatactctctttatcttttgactatccaaaggtgttctgttggacgactgatgccttcctccaaggtactttgggctcccaagtgtgcagttgacatttgctgtgccttctccaccaggctttagtttttgatgtatgctgagcttcagtggagatttgctagccttgggctttctgtgttcttgaatctctcagagtccagaagaaaaggaaagctgacactttctaggaatgacctgtgagaagagaggttggtgtcttgctgctaagttccgcttgattctgaactaagtcaccatgggccagaggaggcagggataagaggagtggtttcttggccaccagaatggaaacgtttttgttttcttgtgtgcttttgtggaaatggtggcagttgctcactaaagagaactaaaacccttttactagagccccaccaggtctgaagaggatgggcgcgtgggagccattatcttgtaaaggacgctattgagaccttgctactgctgcagtgaagagcacaggaaaagccaagcttaaaaaacactgggcgaatcctaagaacttttcatgcagaaacacatgcatgatgagaagagaatcttcattacaacattgtttgacacagaaaaacgagactcagcttaaatgctcattagttagtgattggttgattaagttgtgataaaatggaacactaatacagctgtttaaaaaattagtaaaaaaaaatcagtatgtgagatgatgcacctgttaattaactcaacttagccattccacaatgtatacatcattcaaaacttcacatcatatattataaatatatacaatttttatttgtgaattaaaaattaatctaaaaaaattagtggctatatgaagtaattgggaacaatcttgaagctatattaactaccaaagagcaaagtcaaccttaacaatgctgactttttaaagaatagtgcctagaacactgtgtggagtatgctaacagctacacactaatgcacagccaccaaccccagatcagttacgtgaacttctgcattcacaaacacacttaacacactctgtggctattgcctctttactgacctgtaagtcagttctagaagacagacgatccatgaaggcaggtcctagcctgcccatttgcattggtatctccaaggccaagctagagaaggcacacaataggctttccactaatatttgtgaatgaatgaatgaacagagagaggagttttctttccacagtttccttctacctgctactccttgagcatatgaggctggaatctaagccctgaggtcactcactgctctcctgggtactatccctggcctcccgtccttttccttgagcttctgtgctctgcaaggctttctcattatcctttaggctacagagaaacaaggagacgggagagccttgaaatggaccttcaagattacaatgtgtagctgacattgtcagttaagttgggcagatctgacttcgctgattaagtggatgtatgagccgatcctccccagaagctgggatcagcttccccatctgatggtgagtcagacctgctggggtttgggtcctcgctccagcatggctgcctgtgtgaccttggccactttacttaaccttgctgaatctcaatttcctgatctgtaaaggaagctaaaaatgcctctcttgaggttgtagtgaggattaaatgtgatagcataagtgaaagtgccctttgaagaaagaggaaggcgaaagcgcttattgtgtcaggagaaatgtgtggagagccccctgttgttctcaggtgtctcatccttcccagggaaaaatccccatgccaagtcagaagaggttataatttggctcttactcttttattcaggcacttctttcggctgcccagggttttcagcttaagcaaataaattacccttctccactggactctgtgttctgcagccagccatatgtttaagcttgatagagatttttatctggcttggtaatattacccagcaagggatgacatttcttatcagaggccctgaggaatcagagataggagccctttctttttcctggccgccaggcctccatgtgcagggctggcagggaggctgggaggggctggctgggtctggtagtgggcatcagctggccctcatttcttaagacagcacttctgttagctgacctacacagaagcaggtcatttcgagatgtttgcgtcttggagccactgatagaagcagggcaagggagagtgaatgaggaaggaaggcgggagtgtgatgacgcatgcccagctttgcgcggaggcagagcacttgcctgtgtggggccctgcccttctcttgagaggcaggcgggccctagctgcagcgtcaaggtctggggattctgtggctctgtagggtgaagggcactggagacctaccaggggctgggccattggagtggtgggtgctggggagcttccgtgggcccctccaggtccactccttgctcttctctgccttgttttgtgcccagaaggctgacctgtgtggatgcattatcagggtggatgcaacacagggctgccatgctctctggtatcagtttggaaggcactggcaggatgggaaggcaggcggggagtgaggtcagggggcctatccttccactgcctccctgctgctccctgactgattcaggtaaggtttacaccggggctctaggtttgaattttgattctggcatgtacttgctgtgtgatattaggcaagtggtggaacctctctgtgcgtccgacttctcatctatagtaacgcttttgcattccattgatctctttgcctctcatttgccctgaatgctgaaggaaaggacactgctgtatcccctgagggactgtctgagcccaaagtacactggggacaagggcttcagggtgggcaaggagatgaccgatgatcacgtgatttggaactatagcctccattggagacacgtgctctgggctctttccctcctgagttttgggaagtcctggcctgtgcagcctaattctcaagtactaatcttgcaatcataagaagaggaaggagaagtggttttccctctccctggacccattccagccagcagttcctgactttgcttccttcctgttggtgcccactctgtttccttccatcccttccccaacctctcccatcccatgcctcatgttgggcaacttgagtttaactgtctcttcttccagtggccaagtccaaattctgaaagcacagttctgaccatgtccctgtccaactcaaaaacagtagctccgtgtcacccacaggcttgaagtcagacctctcagggggcattaagtccaccgcaacatcactccagcctgtgaataaagactgaatgcctccgagcctcttatgtggggaatcagttctggtaaacaggtctcacttcttgtcttttaaacactacttgctttccttgacgtctgtgctttgatcccattgttttttctcccttggatgcctgagagatccatgggctctggcttcagagagtgctgggttcagacctcagctccaacagttgctggctctgtgaccctaggaatgtcacctcaccactccaagcctctgtatccttgacattaacctgggctgatagttcctacctgcagggttcttgtgagaagaacctgtctaaaggctcctactggggcttgacttgtcagataaatgaatggggttttccctaaccttctaattgactaccccactgattattcaaactccacctgtcctcaagttccattccatcattcacttcctctgtgggtttttctgccacaaagtcatcttcctctgtttgaaagactcttagttcctcatgtatgacagcaagagtggacctcatctctttctttttgtgtctgacttcccagcacagtctcaatttcttcagggcattgactgtggtgtaagattctcagcttgagcactggaaccatttatgggacgattgagtattcaactccaagagaatgaaagagagtcacttgttctttcattgaacgaaattgattgagtgcacatgatatgttgtgtctgtgcttcacactggagttgtaaggatgcataaaatgaagattctgtcttcacatagcctatcatccagtgaggaggttgcattattgggaatctgtgccaagcctggattgcataagacataggtagctgagaacctggtgctgactggggactgggggaagttctgtgcccaaggagaggaggactcttcccttcagatggatgcccataattttatctttaacttttaagaatttggctttaatgtgcctcaatgaagacctccttatgtttaataaattacaaattatttggacttcatggattgagatgtttattttcctctccagatttggagagttctatgtatttttttctttaaataaactttctatcaccttctcctctgcttttattcctcctcttgagttcccataatgtgtatttcagttcacttgatggtgtcccataagtcccataggttttctttttcatttttttttctttttattcttctgactaatttcaaatggcctgtctttgacctcattgattccatcttctggtcgatcaagtctgctgctgaagttccttatagaatttttcagttcagtcattttgctttaccaccagaatttctgtttgggtctttttttatggtttatctctctttgttgaacttctactttgtttatgtattgtttttctgattttgttgtttatgttctctttaagttgagtttcttcaagacaattattttgaattctttgtcagacaatgtataggtctcaatttctttaggattggttactggtgctttagtttgttttttagtcatgtttccttgtctatttgtaacccttggggtcttgtgttgatgtctacatattttaagaagtagagatctcttttattctttaccaattagctttggccaagaaagctgttcaccagtcaagatattttgggtggattggctggcagggtctgagggcaagtttactgctggaattcttaagcgggctggcctggtgcctgagtccatgggtacaggcctagattctgggtccctgggggccagactggcactgagatacagtgggatggctttattgactgtgttcatgtctgtagcatgcgtctgtgaaggccaacctggtactaggatctacactgatgttgggtgcttacttcactctccttcctccacatgaagggtttctctcttcatgctgcactgtgctgtcttgggggaagggtgatgtgagtgatgtgaaactcttattcctacccttttcaatgcatcttttattatttctatgctccacccagctgctgtaattgctcatctggatttcttagctcttgtgaaggtatatttttcatgggtggttgttcaaattgctgtttctatgaagggatagacactggagactactattctgccatcttgctcacattactcttctcttcatagtattatttaaaatgatacatttagttttgtttatttcacatctgtattccttcactagattgggatcctgtaaggggaagaatgaggtcaattgtgtttaccacagtcataacaataaaaaccagtgctgttgtcacactatgtgcagggcacagttttaagttctttatgtttaccaaattattttatcctcattagacccaactgagatatactgtcacttcattttacagatgaagaaaccaaggcacacaaaggctaagtaatgtggtctagctctcctatgaagacagtagatggtaaaaccaggattttaaacctcacagtggctccaggatttgtgtatctaaccactctgccagacctttctagtgctttcttctagtaaccaccccagcaaagatgctcagcaaatgggtggtgcatgaaacaaagggtcattatcctatttcttgggtaagttctcactgcagtttgtgctctgggcacagagttaacagcatagtaaagaggaggggacctggatctaggaatttaacacagctagattgagatctgagctcactcatcactaagtgactatgagcaaagtgtttaacttcattaagtcttggttttgttagatcaacatggaagaaatgcattaataatttcctattaatcttacattaatggtggaaaaaatgagagtatagattatagtgggtgctcagacagtgtcatctgccatcttggagggctatatatacatatatatatacacacacacacacatatatatgtattttatatatattgtatatataatacctatatatgtgtattttatatatatgggtattatatatataggtattaatatatataggtattattatcagctttagctttttcatccatgagatgagaatttgatgtagtcctgcctgatgtccacacaggctcctcagaatggctttgttttactagagatgttacccctaggaaacaagctcaatcccttgcccctcagtggactagaggcagcatgtttatgagacaggaaaggatgtgagtgatgtgagtttcttagctggctttggaacagaacagaggctctttacgatgatgccagtgctcctaattaattatcataacaagtctcctgttctcagcatctgtcagcaggtacagctgcaccagcacagtggactggctgagcaaccagaagggttggggcaaggccaggccagggcagccagcctgtatctccaagtgcccagctggttccgtccttgtatctgacagggccctctgatcttcctgcatacaatggattgcagggaaaaagaaacttcctggcctgattgacacaaatttgtaggaaacagctgcctttagtggggacaaaaaagcaaaatccagtgtgagtgataacctcttgccagtctgggttctgggttgcatatctgctggtgactataggaggtggtgggaggatgtgaattcctacaaatgctaagttagcatccagtgtgtgacaacagggtgagaatctcctattggttctcccaacaaataggaagagaagagcctgagttttgggggttcccaagtttttgaggtttcaccagtgacttactttattgccaccaggaagtgcatgatgcactctgtaccccactttctttgtagtggcaaaatgggatttgttagatttttttcccacagttgaaaggaggttgctatggcaatgacctgtgcctaagatgaagttgaagagaagtatggaaagaacttgacagttctttgcagaacagcaagcttacatggagaactgaggctcagagaggtgaggtatggcccaaggtctcacagcaagttgagggtaaagctggctcctggaaccaaccatggcttcctaattgttgccatcctcagttccttgcacctgttgattgaaacactgatggcctgcttcaactgtgtcagttctccttgtcttctgggctcattccttgatgggttcaatgtggctggttgcctcttgccacatgatttgggcactccatgtttaatctgacagattctgactgcagttttcatttattttgctgcttgtgtgaatcatgactgtgactgggaatgctgggcccaggttttcagggacacagatcacagagtgagagaaatgccatgtgatggttaattccatctgtcaccttgggtagttacccaggttttccttaaacaccagtccagatgtcactgaaggtatttttcagatgagattaacatttgaatcagcagacgttgagtagagcacattatcttccataatgtggatgggcctcatccaatcagtggaaagccttaagagaaaacacatgaggttccctaaggaagtagaaattctgcctccaggatgcctttggattaaaactacaacatcaaggcttctctggatctccatcttgccaacctgccctgtagaatttagacttaacagtcctcacaattgtgtgagtcaattccttataatctctctatgtccctacagacacacacatgcacagacacacacacacccacatacacacacattctattggttctatttctttggagaaccttgatattacatgcaagctttgtgtttatttgttttatttttattttaaaaaccttggacatcataatatgcagactttagaatgagacagatttaggtatgactccaagaactgccaatgctgagggtaagttacttaacttttccgggcttaagtctccttatcaataaaatggaaataatattaacacctcctacattaatgccaataaacactaaacaagacaatgaatgtaatgcacttaatacactgcctggcctagtgctcaacacataatgctgcttattctaaaatttatactttactgcaagccatgtagctgcatgaatcagttctctatttgctgcacatgaaaccataacaaaatgttgtggcttaaaacaacttatttttctcatagttctataagttggctgagctctgctggtggttcttctgttccacatgggagcatttggaatcggtgtgtggctgcattaaattaggagtctggtgcttcagctggggtgactggagtggctggtggcatctgtcttgccatgaggtctctcatcacgagcagtctagctcaaccttctttatggtaggttgggtagctgaatcccaagtggatagatgtgaaagtttcctaggacagaatcatttccatcaccttcccctggtaaagcagccacagaccagcccagactcaagacagggaaaccaactccaactcttgatgggagaaacaatatgcatgtacagaaatgggaggactcatatcactcactactggacacagtccaccccaggcacaagttgcttttcaggtttatgactctcagcttctactctgcttaacctcttgggttggtttgtaataatgtagtgacctctgaacagaaactctggagccagtctgcccttttcaaatcctgcctctgccactgactagctatgggaccttaggtgagtttcttatttccttcatgcctcaggttccttataaaggaaatggggataatgttggtactgaagtggaacttgtgtgaggattaattgaaataggagtgtgtgtgtattcatgcctatatgcatatgcatgcctgtatacatgcgttcatgtatttacatttgaatgtgcaggtatgtatactcatatatgcatacatatgtgtctgcgtatacacctacatatgtatatatttctatatacaatatatattcattgcgtgtatacataaaattgcatgcatagctcgcacagatgtttccttgtttatacatatgtttgcagcctgtacacgagtcccaggctgctttaacctgggccctgccccagtgtatttgagaaaattttatcactgtgcttgagaactggtcttcagctgggtgttgaactgggacctcccgaggccaatgcctagtgccttctccaccacacgaatggttgccaagactgcccttgggacgcatcagaagtatatcagtgggtcttggtaaaatgcagaatcctgggccccaccccaggcctgctgactccaagagattgacctagaatctggttatttcacgagttgctccggggtgattctgatagaaacgtcataggcgcttctgatcgtggcgggtccctggcagcccatgcttgccccagcagtatcttctttactctctggttaattcattttcctttccctccccagaaaaattgaatgcattctcttcatgcacaaccatgatctcagaggagtgcagaacacagggccagtttcacatttggagttttagtttagtttagcttcccgcatcattgagaaagacagggtattctcacctcaccacttccaggctgagctgacgtcaagtttagctgtgagataaccagaccaccctgagcttccctcccattcacagtgagctgatttaccccaggtccagcttctgggtgatatgacctcattgctttgtaacttccccgaggccttcccactaagaaaattacaactgctctttattgagcattaatactgtatacaaacgttgcttttcttattacttaccatgtagaaaaggtattattaccccgaagctaagggataatagcttacaaaagggcacagaacaaggattcaaacccttatgacctaaccggaaaaacccctttctctttctactatactggcagggagatatgttaagatttgttttcatggccccaggtcctaaattcttcctaaatacttctctttaatatatgtgaacaaaaacctgcagggatattttatccaatttcaaatgtacagattgtctttggggttacaaacaagcaccagaaagtcaggagccaccctggcactggctgacgtgggaggtacagaatgaggtgtccgtccctccaaggcacggtgacctagaatcccactgctcactgcctgtctctgttcagcctttcagttcataaacatgctttcctccctgcattttgacatccatcatcgtttaaattccaggtcgtcatccttgtagaacgaggttcggatctcggcattaaatctcccccacggtgtgtgcggggccttgccatttgcagaacacttcctgagccttggcttatcctgacagctgcgagaggttaccctgtttgtgagtgaggaaaagaaaggctcacatggtggtatcattggcctagctttcaatccaaacactagtcttaccatggataccagaaggtcttccgtcaaattgatcaaaagctgattgtgtgagggtgtaagccaaccctgagatcaaattagggtaagaggctggacccttcatcaggagctggggctcctctctgcaaatactgtagaacatcagcgtcactgaatgaatggagttggttacctgaccagctttcctactcaacatggagctctgtctgtctcatctctctcgattcttcagtgcataacccagttcctagcttgtgatggatccttcctaaggatgtattgggtaaattaatgaatagtgattcgacctaaccaattaaatccctgggagttttaaactcttgtccaacatcagttttatttcacgtcttattataaaacagtacatacctcttccagaaaaagtgaaaaacccttatatcacttagatgtaactaattaaacaaactgatgcatgtgtgtgtgtgtgtgtgtgtgtgtgtgtgtgtatagttgtatggtggtatatatattagtttgtaaatagctcttctactaaatacatgataaatatactttgacatcatcatgtgtacttctactacatcaccatttgactgcttggacaccagacttcaccgttgttcagacctaagtggcaaaaccctttgtatttttctaagtgtctaggcagacatttaggaaatgaattcaactttggcactattataaacagtgttggtatgaatattcctaaagctaaatctttgtgaatatgttttcctactttatgaggacatattcccataaactagaatggctgaaacaagggctggttaggctattgaggttgcggagtttcctttcaaaaagtggggaccagtgtctccctccacccccagcatgacagacgaccatgtcctcgagccctccacagcagggcttcagggtggatttacctttccagcctcatctgtttggcacttggtattgcaccagacgcatggctgttctcaggccatcatcccttctttagagggtctccttcactgcttactgtgtagtgagtgcccttttattcctccttccagcccttgctttgtgcaacacacatctcagatgaattaaatcatgatttgtcttgtttggaggggagcccaagtgagtcagttccctgttgtgtcccggtggccagcacatattttatcatggatagaagcaatggctcacgtcagaaagacctggatttacaatgactctgcttcttttctcgcctgagtcctggctttttcatgtgagaaccccctttgtacaattatgataaggtttgaatgagatatggcagggaaaggctcaatacgcagctcaacacaggtgaatgctcagccattgttgcccaggctcaatggctgggcagggcagttgactatgtgttggacactgtttacgtgtccaccaggggtggtcaaactatgcctcatgggccaaatctgtgcccaccactgtatttgtacaatcctagtgtgaaaaatggttttcacattttttagtggtagtgaagcaaatcgagagaagaagaatattttgtgatatatgaaaattacatgaaatgagaatggaaatttcaatgtccataaataacattttattaaacatagcagaccctttttcttaacatatctcctatggctgcattatgttacaatggcagagatgacgaggggcagtaaggccaggtggcctcacaatgcccaggatattgagtatctggcactttataggaagagtttgctgacccctgggttacatgtgtaagctcatccaatcccgcatagtgttggcagttatcataccatccccattttacacatggggaagtgagatgcaaagaggttcagaaactacctgaagccacatgcagcatggaagtggtagagttggggtcttgttcctagaactgggactcttcatcgttcagccatagggtaagtcattggtctttgcaggtgagggattgtgaggcaggaaaaaagaaagtcatgcactaatgtatggtagaataagaatttagaggctgggcgtggtggctcatgcctgtaatcctagcactttgggaggccaaggcgggtggatcacaaggtcaggagatcgagaccatcctggctaacatggtgaaaccccgtctctactaaaaatacaaaaaattagctgggtgtggcagcgtgcacctgtagtcctagctgctggggaggctgaggcaggagaatggcgtgaacccaggaggcggagcttgcagtgagcccagataatgccactgcactccagcctgggcgacagagtgagactccgtcaaaaagaaagaatttagaaccaggttcgttggcctcaaagttcttggtctcgctctcatgatgagctccttccaccactctagtctcctaggatcacctgctaaacgcagggccagacacacagaggcattcaagatatccctataaatgcagccacttcatagcaatgtcaggactaaatgtggttttgtacttcctactaaacatgagcttaataaatgtttgtggaataaacagatgaatctgatgaatagttcctggactctcggagtttaaactctgggaacagggcagggactcctgaggaaagcagacaactcctcaaccttctcatgggagggaaggagaccttctttcctgaacaccaattatgcttcccaggtggcatggggtccttaggccacaatgccaaacacttttgcagttaaacttccgatgaaggaaaactggtctgtcttctctgcccattacaattgtctttactctttttgattctgaatgttcttttttctttaaacagctttgttaagatataatttacataccgtacaatttaccaattttagaatattttcctcatctcaaaagaaagtctgttccctttagatatcacctcccaatctcccttctatccccagtcctaggcaactacttttttttttttttttttttttgagacggagtctctctctgtcacccaggctgtagtgcagtggcgtgatctcggctcactgcaacctccacctcccaggttcaagtgattctcctgcctcagcctcccaagtagctgggactacaggcatgtgtcatcacgtccagctcagttttgtatttttagtagagacggggtttcgccatgttggcgaggctggtctcaaactcctgacctcaagtgatctgcccctttcggcctccaaaatgctgggattacagacgtgagccaccatgcctggccatggattcgcctattgtagacgtttcacgtaaatggaaccacagaatatatggtcttttgtgaggaacttcttcacttggcataatgttttcaaggttcatctaagttacaacatatacttcattcttttttatgcccaaagtatattccattgtgtgaatatatgccccattttatttattcattcattagttgatggacactgggttgtttctttgggggtggggctgttatgattaattctgctctgaaggttcgtacaagacttcgtatggaggtatgttttcatttgtcttgggcatgtgtatacctaggagtggaattgctgggtcatatggtaactctatgtataaccttttgagcaactgctaaagtcttttccaaagtgtctaccctgttttacattcccactagaagctgctcgttcttgggctcattattcgtgtttatctttaaacacagaacgtgactccattcatatgacggtgctagaagtcagtacagtggttttctctgggacgatggcagaggaaactatgaagggcccaggaacactttctgggaaagggaaatgttctgtgtcttgctggtttggtgcatttgaatacttgcatttgtcaaaactcatcaaactgtttatttacaaattgagcattgcacggcatgtgacttatgcccgattttttaaaaaaatgtacaaatgaaaaaacatagaaagagaggaaaaagcaaaatatctgtattttaattatcacatgacctgactggctgcttatcttacccaccttcccatggacacagggccagtgcctggcaggcaaggccacgtgcaagaaaagctcttaattgatgtgattaactacatctcaatagggagcctggttaacaacaggggagtgaaaaggaggctatttttcactctcccaactggtgaatgcctggaaggggtgatgggggcacttggagggctgccccctgcggtgcagggggagacaggacagctgctttttcctttggcattaagataattttaaaaaattattttctctcaattgctacaaaacctactcttcattttcatctatgaggaggaagaaaccaagttaatttttgtttagtgtgtttctgaaggccacattatctaccagaacacaacatttcctaggatactctttaacccttcctaaatgcacctgttcagaggagcaggcaacaacaggaaacaaacaaataaaaaagaagtgaaggatttcctctttcccccttagaaggtggaaagaaatgtatggattgacataaattcacagaaggtgagaactgggcaagcaaacacattatccatgttcttaaaaaggcaaaattatataaattttgataaaatttctaaaatagtatcatgtcatttgtaggctagaaaaaatatgtatttgctagtaaaaatatagacctataaaaacaccattacttgggggaggatgtggttatttgtgtattttttttcttattgctaatctgtgatttatttttttccaataaccactagttgcttgtgaattaaattgttgagaaattacttgggttgttatttctgatttgagagatcagtttcctcagtctccccctttctagaacaggcttccttctcccatccctcctgtgtttaaagctagggaactttcaggcagcactgcacagggcactgaatgtgaactttgtggttagctgggtcagggtttgatcttgcagtatctggggcaagtcacagatcttttctgtgtcctggtttcctcactggaagaaagggacagataatgctctccccagtggattgatgtgagacatactaggaaatccctagcacagtacttggccttttgaattagtttaccctttctttccaacctacccctttatcctggtctttcctggcaccatgaaaaccagcactcagcagtacagtttgatgacttcttattgctaggtttcatctgtaatcgttgcagatgcttaaatacacacgcaggccaggcacagtggctcaagcctataatcccagcactttgggattctgaggtgggaggatcactttaggtcagaagttcaagatcatcttggccaacatgttaaaaccccatctcaccaaaactacaaaaattagccaggtgcggtggaggacgcctacagtcctagctactctggaggctgagacacaggaattgcttgaactcgggaagtggggattgcagtgagctgagattgcaccactacactccagcctgggcaacagagtgagactctgtctcaaaaaataaataaataaattttgagatttatgtgtgtgccagacacacacacacacacatatgtacacaagcaatttttgtgtgtgtggctcaagccaggcagagaaagacaaatactaaatgatctcactcatatgtgaaatctaaaaaagttgatctcaaagaagtagaaaggagcctggtggttatcagagtctggggagggggttggggagatattggccaaaggatatacaatttcagttaggtaggaggaataagttcaagaagtcgattttgactatagttaataatgtgttgtattcatgaacaaggctaagagagtggatgtaaagtgttcttaccacaaaaaggataactacatgaggtaatgcacatgttaattagctagatttagtaattccataatgtatccactgtgtccttcaaaacatcgtgttgtaaatagtaaatacatacaattttatctgtgaattaaaaaaaaagattaaagaaaacccccatccccacggatgagttaagactgatcactgacggagctagtatgtattactaaccaaagctagaactcattgccgcaagcatctgggtgacagcgctattgatagtccttcctgcagtacccgtccctggcagaaacaccttcagtcttcaggctgggtgcccaatgatatgctagaaatattaactcctcctgtaaatcaccagaggggatgcagtctcagactgagtttgagtattgttttccgggcctggaggaggggctcagcagagagcgattcatggttttacaaaatgtatttactctggtggaacgtgtgggctcacgtgggcagaagcacatttgcacacatgcaaaatgtaagccatgcaccgtcatcttttcacccttgtttggtcaccttttaaccctccttcctcctccctaattgcctcccccagcccatttcctcagcctctttttatggcagtggttttcaaacctcagtttgcaaatgatcatctgggaaatgtgctataatggagattcctgggttcccccaacagattttctaattcagtggttctagggtggggccctgcctgcaaatgacatttttaccgaacatctgagagagtcccatttgaccagttaagtgctataaacagaatgtctgggacttactgatatttcaaagacccacaaacaaacttgagaacaaacatgtaaaattcttagctgaaaaatatgaaaacaaaactgcaaaatagaaatagttatactgtatgttttatagaactttatgtcaacttgtcaagttcgcctcaacttttacagttacataggaattattttttaatgaaggatatgagtgcaattaatgcatttgatacaatgtgtgtgaggcctacaaaagccttataaaagctgtcaccccatggaccctgctctgagaaatatgcccttagatgatttcttgcttgtagcattttagatctggaaggccccttagaaatgtgcttcttcaatacccagattttactatcagagaaacagaggcctacagggggaaggaattgcccaagtttacacagcaagttcctgaagaggccagactagagtgaagcatttacaatgtacgtgcatgtgcatgcgtgtgcaagggctggttacatccctctcagaagtctcttcttttttattttttatttttttttgagacacaatttcactctgtctcccaggctggagtgcagtggtgtgatctcagctcactgcaatctgtgcttcctgggttcaagggattctcatgcctcagcctccagagtagctgggattacaggcacacgccaccacgcctggttaatttttgtatcattgacagggttttgccatgttggccaggctggtcttgaactcctgactgcaagtgatccacccacctcaatcttccaaaatgctggggttgcaggtgtgagccaccacgcccagccagaagtctcttcttcatttctctttcactctggctgtttttttccctttggtccctatgttctcaggccagtctgaaacttggccctgaaccctgagggtaagggagaaaggttagtggggggatctcagggttgaaatcaataggcatagtatctgtcaagaccagtcttcagcttcaagtcttcagctctcaagtccctgtagggggaaagagagaggaaatgcaccaaggggggaagaagtgctgagtcatgtcacttcaagcagacacaaaaaactggctaacttcttagcagcccactgagttccgacaatgtgctggacattgtgcacactaaattaagctgacggagtccctgccctgtggaacctttcgttcattcacctactcatttcacaaatatttgctgagagtcctactgtgtgccccacactgccaacaaggcagatagggagcttagaacctagtctgtgacacaggcaacaacagatgacagatccataaacaattaaggcatttcagttaagatatttcagatagtgacaattactatgaagaaaatagaagaagataatgagaaggaaagtggctgggtgcagagcatgccattttaaaataagttcttgctagttgaatggatgaatagtaaattccatgtgacctgaaaggggatatacttaggccatttattgtttctgactctgccttccacagggtaagactgaactttcttacccattgtgagcaattctggccaaggagtagtgagcagaattgacatgtcatttctggccttcatgttggaattctagtgagaaaccctccagaggtcattctctcttctggcctgctgctgatcagtgctatgtgtagaggctgccacgttggcctggtctggatgatgctgagattgagcatgatctcaggttgacctgtgatgaacatgcagctgaaaaaagaaatgaatctttgttgctttaagccactaaaatttggaaagacatgttagtgcagcataacagcgtcacttctgactaatactaatacaacctgcaaggcaaaataagtttgaactgtcactctggatccattggtaggggttttcttggccctgaatgggaaacaactctgaggtcccaactgggcctggtaggaaagtgggctctaatgacttggtgttgaccaccacgcctgtaggtgggaggtggcagctctggtaccacatgcctgtcttcctactttaactttcataaaaggttcttaccaggatctttttctagtctgtcctgagcatctatcctcacaaatgactctcatcagctgcactgctttatgtggtcttcactcgtctctttcctagtgcagattcttctcattgggttttaaggttctcaaaattctgaccctaacacaccctccctcaggggacttcttgctggccactgagcatccaatacccctcccctgctctaggccttcatcactgaatgctatcctttcaccccaccccctgcaaacctacctgtcctgtgggtatcctttaaatctggctctcagaggactttcctttgcagccacagtgaccctgctctcctgaacccagaccacacagtgcccacactcaattaatctttgacaatcttgttttatcttatacttcattgctgcatggttatctaacaatcctcatgttgaagtctcgactccctaactcggttatacactcaaggaatggcctgggttttgcaatttctcactgcaacgtcttggtgataacaggcacttgagaaataagtttttaaagagttgattggattggtgatgtggggctagagagtagaaggggaaaactgacgtggagtcatctaatgggcattgtccagcccattctgcctgtcctgtctccaaggccagtccttccttccacggctggcacagtccccgtgtgatgtccccttcctgaaatggttagacttctaatcaaaaggtctatattggagcagctcagtacaagccattgcagtgggaaactcagaaaaggaacacacaggatgtcttggcaggatgagactaggcagcaattcgactttaggggaaaggggaggcttcctgggggaaaggatgtttaggctcttcccagaaggaggtgtggggattaacccaacagaggagccagaggaatgctctgtggagatcccaacccaggcctgggctggagaactggagttaggggtgagctggagcaacctgtgaccagcgaccagggagggggctggaggagtgatgtggggcctccctgcttgcaggaaggagtttgaccttatccttagccctgagggatgccccagaggggttttaaggatggaagagactgatcatgctgtcttcatgtccttatttcattttctgcctttcctcttctgactctgctcttatttttctattcttggactaacatactttgtgtttttttttttttggttatcttatttgaaaatcaatataaccacatctataaaaacaattttaaagaatgcccaaatcccagagccatcatctcacccaattacaactcttgccttcatgtctgcttggcctcttgccccctgttcctgctgtgcatgcatacattttacagggatgtgtcctcagtggacgtgagattttttttttctgttttgcagttttttacacaaacattttcatttgttgttcctgtttttccttctttcccaggaggctttaggctcccattctcctctccctggctttctctctgtcccatccaccgctctacccttcaggcctgcctatatgaaagaggtctctttctatgcagaaaactcactttaacaagatgtgggtgctcttacacagacctcatatgaggaaaatagcacatcagtgaacttggggtccctgggagtcacagtgatgttcaccagaaaatcagacaacggtaatgtacctcccccatcaggttgccaaaaattagaataggttttgtgttttttgttgttgtttgtttgagacggagtcttgctctgtcaccaggctggagtgcagtggtgcgatctcggctcactgcaatctccgacttcctggttcaagtgattctcctgcctcagcccctgagaagctgggattacaggtacatgccaccacacccagctaatttttgtatttttagtagaaacggtttcaccatgttagccaggatggtcttgatctcctgacctcgtgatccacctgtctcggcctctcaaagtgttgggattacaggcgtgagccactgcacccggccagttttggggtttattttaagaatgtgtcagagcctggcatatgcctccattgccggtggcagcataatttgttcttttggagtaacaatttgtcaagaggcatcaaagccttactttgaccttgtatccctatttgggaagtttatttagaagacagtttccagaaaatgagaaagctgtgtgacaaaagggggttcttgcagcctattgcacttcagggcaaattagaaacaaagtggactccagggtccttctgtttcacggaatctttcccagacatctgaagggtcatcatggagaagaggcggcaccttaaggacagcagtgacaatctctgatgtggcaattacataaggtattgcgtccttcctgagattacacaaaacctgtatagagagaggctagctgttcattggaaaaatgaaggttttgcctacttggaataataagagcatgacagcttctttttttctcttctttcatctcatctcttctctttttttatagcttgtcttattcagttaaacttcagtcattaccatagaataaagtaaaaggcaatatatattgaatgtgtaaggcccatgttccactaggaatgacgtcacgaaaggacagcctgaccctcgctgctgtatcaggcatgggcacagcgcacactgctgcactcaggggtcagagcaggaggtgctcctgggtttcatgatcttgctttttgtccctcatggtcatgtgtcatttcatctgcaccataatcgtgctgggtgggtaacgtaaatccccattttatagaggagagagctgagtccttagggctcctggcagttgccatccaggaagcccctgctacgttccaagcttagaatctccccacactatctccttggatgctcacataacagctctgcagagccactcttcaaacctgctcttcatgatggggaaactgaggcactgtgatttgccaaagagccgtagccagtaaggatcaaggcagcattcacgcctgggttctctgactgtaaatctggctgtgtttttttctttcgaattttattatgaatgccttctttgttcattgtcattattatcatcatcattgatctctaccaggccccctacccccagccacttgcctcctctgttgcaagaggagatgaggagacaaatgtggaatttttattcccattcccttccctcctccataggcagccactccagtgtgcttgctgcaggccctgcatgagggcctgcatgaggatcctccctgtcttgttctgattgggtatctgtttttaatttagacaaatgggattctgctatagatctcaatttggttcttttgcttactcaacactctttttcagagccagtcttggtgctctgtgttcacctggttcatctgaggagctgcatctaccctgcccatgccatagatcctgccctgtttgcttctcctgttgctgctagtggacatgaggtaaccacagcctagttctgtgataagctcttcacacctgtacccatatggactgtgggagagtttctctgatatggactgtgatgcgggtgagtcatagtgcacactcacacttaatttcacaagtactgccagattgtgttccagaatgactgtaccagtttacacttccacaggcagtgctcaagatttctgtttccctctgtcctcgccagcacctggtattggcagatgcatcaaaaaggatgcatttgacagctcaaccacctcagagcacttgattagcatccctgtgatggccctttctgctgcagacatcactttgtcataacagcattttgagcaggaagaagcatcaggcaggaaaaaaggggcccttttactgtgactccctatcttctgttagggaagaaaattttccccagaaatccccagtagacttcccctatgtctcagtggccaaactgggccaggtaagctcccagccagtccctgacagagataacaagattgtcatggctgtttcaagccagggccaattcttccccctgccatggactttttttgagcacattgctatctcccttgtccctgaatagaactgggaatattttaataaagaagaagagaccagtggctgatcagtaacttggcagccaacagagtcttctacatcagagttctgcatttgccaactttttgcatgcatgctgcctcttctatataagggatcttcccccacatctgtttgatttgcagagaatgtcagaagcggcgagtcactcatacatgtccattgctttggggattagatccatccagctcattttggaaacggcaattctttttgccaggcagacatgagacccatttccacaccagctgctccagctgaggttcccatgcaggttctgcgtgacagaaatcaatagaaagattcgaagggcagagcaccaaagttcctgccctgcaccatgatgtcaaagcagaatgcctgctgaggacaggtgcagatgaatacctgtcagagagtatcacttctgcaagcagcaacttccccttcttgtcagccacgtggatgccatagtaaccttgtgtttctggctagctcaagaaattaatttataggatgtgtgcagcaggtcatgcctgtaatcccagaacttttggaggctgaggcgggaggatcacttgaggccaggagattaataccaccctaggcaactaaggagacccccatctctataaaaatttttaaaaaaaaaaagcagttttggtggcacatgcctgtggtcccagctagttaggaggctgaggtgggaggatcgcttgagcccaggaggtcaaggctacagtgagctctgatcatgccattgctctccagcctgagagacagatttgagactctgtctctaaaataaataaataaataaataaataaataaataaaaataaaagaaatggaaaccgtatagttataatttgttgagcacttatctttgccaggtggcctgggaagcattttatttctacgatctcatagatatctcttggcagccctctgagagcattgatatattattgctacatcacaggctcctacagaatcctgattctgacaattatcagccatgtggccttaggaaagtcacttcattttttgtaccttagctttctcatttctacatgaagaatgataatagtatattgcacctgctcacagagttaataaacataaagtgcctagaatggcacttgatacttattagctactattgttgccattttttaaaatgaagaaattgagaggttcagaggggtcaatttgccaaaagttagttattaagtagcagggccatgatttgaatccaaaagcttctggctccgaaactgggcttttatccaagggaacatcaccattgcgcccctcatcagtagaatcaattttcaggtgaagactcggtgacaaagaccacaaagacatagtgtaattcttctaacacatgactggatcatttctggaaggtggctggggacatggatactgggccacagaacaagcatgcatgggatggaaaagacacagcgctcaattcctaatttgaccactcaatcttgcagagcctccacctccttatttttaaaatcaggttttcattatagttcctcccagcaaggattttaaaagtgccttataagctgaccatctccaggttccttattccaaaattaggattttatatgtcactttatattatgtgtctcatctcagtttccacttacactgacaaaaagtctaagagtcatttccccccaactccattttagtcaccgcgaggctcaggaaaacagaatttcagaatcttctggaagagatgtttcctttcttaaccaagctaaatggactggaggcaggcaccgctggtgtttttagaaggctggttaaccacagtgcctagcggtttggggaaaaataaatcaggtagctttctgtggcacgagacattcccttaccacatttgtccacttgagcacttttattttattttattttatttttatttttattatttttatttttttgacagagtctcactgttgcccaggttggagtacagtggtgcaatctcaactcactgcaacctccacctcctgggttccagcaattctcctgcctcagcctcctaagtagctgggattacagttgtgcgccaccatgcctagctaatttttgtatttttagtagagatggggtttcaccatgttggccaggctggtctcgaactcctgacctcgagtgatctgcccttctcggcctcccaaagtgctggattacaggcgtgaaccaccgcacccggcccacctgagcatttttagatgtagacctggtgatgggtctgaggggcagcatgttctgtctgaatggggatctcaagctcagtgatgtggctttaagcaaaaaggatggcttcaaggtctagatttccttgggagcacgttttaacctaaacctgcataactagtaactcgaagatcttttaattttattgttttttaatttaactgaccccgttctccctccttttctccctccatcccttcattcctccctcccttccttttgacacaggtcacccgatatagaatcacacacctgggagatggcaccagccagtgaggctcaaatttgaaccacacacaaatctccaggggtacttggtaaatgcagacttttgaccaatttttcggcgtggggctgagcatctactctagcaatgagctcccaggcagtactgatgccgctggtccatgcatcaacccacttcaacttgtgaggaatggtctgctaccctccctagccctcctcatgcgccaacccatttcaacttgtgaggaagggtctggtcccctccctagccctcctcacacaggcagttgcagatactgtctagaataccagattgattgtgcacacatttgaccttcctgaccatcctgggagctgtgagaataacaacaatttttttttctttttttttttttttaagatgagaaaactgctagtcagagatgctaaaaataactaggcacagctgataagtagcaaagatgaaagtccaagtgcagaggcagttccaagtctctgtagtcttctccaagagctgatggatgaatgtggccctcctgggatggaaggtgtccttgtgctagtcatgaacccaacagaaagcaagtgccattttctcttctcttcccctctttatctctgagatcttaacttggctgcttcttttcagaagacagtgatgcactgtattcaagtgatagccccagcagtaacattgatgcagagaaaatggaatactttttacaagagaccagaagacacatgaagctagaaaaaggagcccagaaaactgccacattttgcccatatagaaaagcatatcccgaccgggcacagtggctcacgcctgtaatcccaggactttggaagcccaagatgggtggatcacaaggtcaggagttcgagaccagcctggccaatatggtgataccctatctctactaaaaatgaaaaaataaaaataaaaaaaaaaattagtggggtgtggtggtgcatgcctgtaatcccagctactcaggaggctgagacaggagaattgcttgaagccgggaggcggaggttgcagtgagccgagatcatgccacagcactccagcctgagtgacagagtgagactgtctaaaaaaaaaaaaaaaaaggggggggctccttcccactcatttctcccataacatgtaatgctttttatagtgatttggtcactgctgagctatcttcatttaatgtggttttgacagaatagttggtcaggaaaatttattttcaattaaaataacttgttgaactgtctcggttttgaaaggattccgttaggatggctaattatatagcggttgctacaaggagatatttgcactcaatttcagctcttaggtaattcaaatcaaatgcttgagattttcctccctggagctgtgtgcaaccatcttcctctcacactgcaggcttcccatgagttatttttagaaacccaaatttaagcagcaattttggcagagccatttctagtctagtggagtaaaccatatgtactgataaatgcagccaaagagttagtttctttaaaaagtaacaaaaccatctctctccgttcatgggggttatatgtttacaaactgcaaactatccgttgtactattatattcatttgtgaactctagctgaagtgagagatcatggatattactttaaaattacaaagatgtgtccttttgcaaactgttgtcataatactctttttttttcaagatggcaggccttggcagaattgactggagactctgttttggcctttggatttcccgtgaaacatggagatccctttctttattttcctactctgctctgatttcttcattcaccagagcacttgtaatatatctcatcatgcttataagcaggaaacctcctccttctgtgttagaacatattcttgtggtcaggggctggatttttttaccttcttcatgcctggcacataatagatgctcaaatagtgcatgaatagatcgatgaatcattaaaattatatttctattttctcctttttttaaaaaaaaatcttttattacgtaaatattaaatgattgcattcatttcggaaaaattaaaaattttccacaaaaggccaaagtccttttagctcacccatcttcaatccttgtctcctcattagttctgtgtaggtcatgtttgttatcttttagagcacattcctgcagaccattctaattcatttaagtgtatacgcatgcacatatacacactgagtactattgtgtacacctctggtagagtattttgcagtttaccccttttcactcagcaatatattgaggagtgctatccatggtagccactctattctttttaactgctacattgttctattgtttcatgtggatgtacccaccttttatttggaccaaatacacaaattatttatctgctttcccattcattatacttacagatcgcttctcttgtataagttgacaaacccagccaggttcactgctatcttttggtagctacaacacattttatcaaaatcagccacttgccttagaaattatatcaaaccagtagacagattatgtaaaattcgaagtgttgtcagagggaccagagtttcctttgtcctcacagtctagagaagtaccctgtgctctgggaaccccacagggttggatagtgagtgatgctgaccaccactcactctgtgttgtgacacagtgatctggtgtctgctctgcccacagccagctgggtttccttgagcagatcatttcttctcccgggacgttacttctcttatctgcacaatggacccagtgagcagcctgaagctctttagactgaataactgggcctacacactgccaccaggattgacataaagaatgtcctgttagctcacccttcactatatgttggggtggggaagggcaattcctgataaagttccaagctccagcccagagctctgagctgagacaatgtctcaaagagcccatgagtggcaaggaatgtattgtcttcagattttcctcctctttcctactattttaccatccaattaaaatgaatatatatttttttcttttgcttaggtttgtctttgttctaagcaaggcagtatgatgatgggaaaaaaggttgtggacccctgaattctacttccaaagttgtttaattctagctgtgtgttcttaggcgagtcgcttaccttctctgggcttccgtctattgacatcacaattcccagtgagccaggtatccactaaaatgacactgaaaagttgaaaaccacactcgcttatgagtgattcatttggcatttgtgagccttgtcacctgcaaataggtcatctcatgaactgatgaggcatcctcagagaccacgagagcccatgaaatcttcttgtttcacaggagaatttgcagctgtcctggcccctggtgacacatgctaagcccttcaggggcttctgagagaggcccagagaaggtgctgagctgccatgattcacaggtgaagttttctcacctaggccctgaggctttgtggtggatccacggcaaagggtattcccctgctttgaggctcaggaccacagaggtcacaggatctgattcagatgccagcgggtttccctagggggcccaatgaggctttccatgtagggcaagagttatggctccctgctgggtgtttcacatgggtcagcagactcaatgtggttctgaaggtgaaaggtcagtgtaaatgggtgtgaagccacgtgggaggcatagcccatctaagtgtctggggttttggttcccctagtcccagaactttgttttttgcccctactgtgagtttctgttcctgaacaccccttagttaagtgttccctggttgagcaggtttctaccaaaggagaccaaagctcagtgcttttccgctgctgagctcgctggggtaggtgactaaccctctcctagcatctgcttcctaacctgcttgggcttcagggggtgaaatgagattctgcaataggtgctcaatccacatttcttttatttcccttttcctgttttatatggaaaaaaaactcataattttataagcactgaatctataactgagcttccaaaaacccaccctgggcattttttcacattaaccaagataaaccaaaaaggcagtaccacgaatagagaaaatgtcattaggaaggtgtacatgataaattcgttttttaaaacaggaatggtgatcgtttccatttatcaagcctctctgcaaatttttcagcagctgccttcctcattttaataaaatgcttgcagatctggtttgcatttttgtagataaatgtagaacaagtcacattgacactccctacatctgatcatcctcccagccatcaataccattttcattcacagcctggaatctttaagaaatgagtcaacctgacctatgattcacagatacttgatctgaaatgcttggtggtgtggggttggtggatggggtagaaacaaaaataaatttcctgacaccaaaagtcagttcaagtgaactagaatgggcagagaggggtcgtggggatggttcctgcccttcaggagctgcacttccaagtctgacttagggtgatcacacatccaggcttgctggtggagcttcagtttatgcctgtggtcccagcctcttaaacagttagcgtgcctgtccacgattagaaatgtcacacgttggaagatgtagggttctgaggagagtagagtggcagttcttaaaggccagagataacatttaatcatgtgtatctccagtgcctagcctcttgtaagaaattaatacataaatgcttgctgggtaggcgagtgagtgagtaagtggtttcttaaactcccctccttgttctctaaattatttctcatttttctttgcatgtttgaagcacctggtgactctactgggttctcaataagtatattttgaataagccagaggttcagagatcagtttcttacttgcttgtaagcaaccccatgctctctagctctgcgactttgagtgggttagcccagattacttagaacttagtactaagaacagtggcttccacgtagtcagttcctaagaaatggtaatggaggaggtggaggtggtgttattgttattagccatctagctttactgccagtttttgtcttttctccccctaactgtaggaatcgtagactatatatatataagacctcatatatatttttagaagataagtcaaatataagaaattgaaaaaatgaataaaatagttatcctaatcttgtgcccttggtaacatactatcaattatcattatcaatgtgctataccccatttatgtccgtttataccagtgttgacagggtctcactttgttgcctaggctgccatgcagtggcgcaaacatggctcactgcagcctcgacgtcctgggctcaagcaattctcccacctcagcaccccccgagtagctgggactataggcaccagccaccacacttggctagttagggtttttttgttttgttttgtttttgggttttttccttttcttttctttttttttttttttttacatagttgttatcttaaggtgatttccaatttttttttccatttacatttttccacaagcattgtccactttattctgtaaccttttcaactaccattttgaaatttgcttttatccatgtggttgtttgtgatgaactacaggttgctgactttcttccccttctgtaaataaagttttcttcctagtatgtcctgtatctcaagaggatctcatcagtggaatcattagatcaaaggatatgactgttgctcagctctctgtgtgtatgtaaattaataggctgtttatttgagcagttgtaggcttacaaaaatattgagtcaaaagtatagaattcccatatattctcctcttctcccgtcatatcccctattattcgcatcttgaattaatatggtacattttttacaatttatgaactaatattgatacattaagagttactggagtccatagtttacattgggcttcactctttgtgttgtatagttctgtgggttttgacaaatgcatagtgttgtgtacctaccattataatatcatacaaaatagtttcactgccctaaaattcccctgtgcttcccctatctctcctcattactccctctctcacactaacccctggcaacccactaatctccatagttttgtttttttcagaatcacacagttggaatcacataggatatagccttttctttttttctttctttttttgagatggagtctcactctgtcgcccaggctggagtgtagtggtgtgatctcggctcactgccagctccgcctcctgggttcaagcaattcttctgcctcagcctcccgagtagttgggactataggcacccgccaccatgcctggctaattttttgtatttttagtagagacagggtttcaccatggtagccaggatggtttcaatctcgtgacctcgtaatccgcccgcctcggcctcccaaggatgtagccttttcagactgattctttcacttagtaatatgcatttaaggtccctccatgtcttttcatagcttaacacctcattcgtttttagtgctgaataatatttctttgtctggatgtaccacagtttatttaccctgtcacctactgaaaggcatcttggttgcttccaggtttttggcaattatgcataaagctgctataaacatttgtgtgtaggtttttgtgtggatgtaagttttcagcttatttgggtaaatatcaaggtgttctgttgctagatcttatggtaagaatatgttttgctttatagaaaactgccaaattgtcttccaaagtggctatatcattttgcattcccaccaacaatgagagtccctgttgctccaaatcctctaccagaatttggtattcatgttttggatttcagcattctaataggtgtgtagtggtatctaattgttgttttaatttgcacttccctgatgacatatgtttatttgccatgtgtataccttcttcgatgagatgcctgctcagttcttttgctcatgttttaactgggttgctcatttccctattcttgagatttaagagttctttgtatactttgtataaaattcctttaagtgacatgtcttgtgcaaatattttctcccagtcaatgccttgtcttttcattctctttgtagtgtctttgcagatcagaagtttttaattttaatggagtccaggtcatcaattagttttttcatagattgtggctttggtgttgtatctaaaaagttattgccatactcgaggtcatctaggattctctcctttgttatcttctgagagttttatcgttttaaatttacttttaggtctatgatgcattttgaggtaatttttgtgaagggtttaagatctatatttagattctttttttgcaaatgaatgtctggttgtttcagcaccatttgttgaaaaaaattatctttcctcgattgcaatgtctttgctcctttgtcaaaggtcagttgactatatatatgtgggtctgtttccaggctgtctgttctgttccattgatctgcttgtttattattttgccaataccacgccatcttgatgaccatagctttataggaagtgttggagttgagtagtgtcagtcctccagcttgtgtgttcttttcctgcagtattgtgtcagctattctgggtcttctgcctcgctataaaagaatcagcttgtagatatccacaaaataacttgctgggattttgacataccacagattgtttatctattcacttattgaaggacatcttagttgcttccaatttttggcaactacaaataaaggtgctacagacattcgtacataggtttttgtgggaagaggaaatctactcatttgggtagacaccaaggagcgcaattattggatcacatggtgagactatgtttagctcattaggaaactgccatagctatatgttttttgcatttgttcagagatttttcgttacaatgtcactaacatgattaatcctcagaataaacctttgggttgggggttattagccttgccttctggctaatgttattaaatgttattgctgaaagaaaccctgaaggttcctaagcctctaagctttctgagtgtgagatccacatcccctatcactgctcttctatggcttccatggcaccgtgagtataatagttgctgaattagtgtccactacacactgaataccaataatggaaaaaccacttcactgtacagatgaaaacacaaaggtcccaaaacgagaaatgagatacttctggccaaacggcattttaactagtaacagaaccaaggctaaaactaaactattgtagatccgtagacctgtattttgagccaccagtccttgactcgctacattcaagcaagacaagctggaagattcttaaatctgtaattagtattgtattgaacaccccccctcactttcaggcctacccactactgactgccattaccagatagcccaaagacgcccaaaatggtgttctaatctgagtacaaggccactatagctacaaagtctcatagggtaatgagtgataatagcagtgacaacaataataaaaatagccaagaattattgattgcttagtattgtcagggtctttgcatatattatttcattttacactcatagctgccccttggttcaacatcattactagccacaatttagagataaatagattgagctttagggaggttaagtaacttgttcggggtgctacagctttcagtggtaaagccacatgtgtgtccatccattctcgactccacttagcaatgtactactttacagttaaaataatgagatttagagttagatggacctgcattcgtattctggagctgccatattgtcagtcatgtgatcttaaccttgtgacttctagctgcaatgttcccatcatggggtagcaacatccatggcagacgctgtctcttgttacctcaaaaccattgcctcccactgtacagaacatcaatatgttcaaagggttggcaggaggcaccaagtctcagggaagtcagactcttatcccaacctggtgactggtttaaactagatatggtaatggcaggcaagttacccagtcttgttaggaacagtatgctgaggagggagtctcttctcaaatgaaaaggcaaagccccttacaaaggaagcttattactcctttcctttcttcctccctagatcttggacatgatacctggatgtgcagcagccatctggtaattatgaggtgacaagtcaatagactgagatggtggagcagcaaagatagaaaaggtctggattttttatagcattgttgaactgttccatcagcctaagacagttgactatctccagacttcttgttatgtacaacatgtcctgttgtttaagtcactctaacttggattgtttcttattttcagctgaaattatttctaatagatatacagatttccaacaaagcacagtgtagagcagcttaacatggtacctatgtgccaaagttccagagcaagagttcctgggttctaatcttggctctgtggcgtgactttagacaagtcacttagcttctctgtgactcgcttttctcatgtataaaatgctcagtaactgtgtattgactgttgaataaaggataatagtgatactgaattcatatgattgttaggatcatcgaatggctaaacattttataaaatgattagaacatcgcttggcgcattgtaattggctgcagatgtgcttgtcaaagtaaaattaaaagaaaagtagtcactattataggcctgggtttgcatcttgatcccatcattgggccacttgtggtatttaagcagaaccttcaccctttcactactgaggctcatagagcatgaaactccccctaaaatctgtctcaaagcagccacaatggtggtttctttttgacaaaaaaaggctccttagagaacgttggcttgcaaaggagaggctgtgactaccaagtcgtgtcaacaactgaatggctgaaatacccaaacttgcccatgcaaatgggcttgggtctctcctggcagccgcctttgaaggctctagacttatctgtgaactccttttttgagagggtctttccaactagtggtttattctttgactctcctcataccttttttgccagagagtgagagtgagaagggagggctaatgcctgagctcctgccctttctatgcagtgagggtcaagatcctcagctagtgtttgagggaactggtgtaacctgggtctctcattttctaccatccaagttgccacctctgtcggggtcccactctaatttgggcagccactaagcaatattttgaaatataccttgttcatgagtttaaaggatcaactggtaggtgtgtccattagcaaatcctatggaacaaatatctgctctttttaccccctacttaccttctccaccaaggacagttcagacaaagttgtcaccacctttagcctgatttactgcaggagcctcctaatctatcttcctgtttctactctatcctttatcccccccttggcagccaggggatcctttaaaaatgtgaaccaaagcatgagactaaaccactcaaaatcttcccatggatctcatctcagattaaaatcctaagtgccttctctgtccttagtgaaccccaggtgcacccttcctctgccactttcccccttgtttattctactttccacactggcctccttgctgtgggccagacatatctgagaccagtgtggcttcagggcttttgcacatacgattttccttttctggaacactctctcttccttgcacatctgcctggctctctgctcagatgtcaactctcagagaggccttttctgaccactccctctaaaagagtttcccccgcccctcatttcccatcattatctgtagtactgatgacttgcagatgttattacaaatttggttattttttgcatcctccagcaaaatgtaagccaagtgaagaatgaggtatcgttttgttcatcaaggaatccacagaaaccagaacattctgtagcaggtgatcactaaatatttgttaaactacaaagagccattttaggttagaaataaggtatagctgacagaattctaagcctgatgtttcttatgagcctgctcaattggccctgaaaccacttcccagaaagctctagatatgttctgaataatgggagcaatgctggaccagtgtttgaggttccaaagtgaatacatgaaagtgaaaatgaagctacatgtgactggatgaaccctcttgcattggtttaaaaatcctattcatcatgattagttcacgctctctttttcttgctttgctcccaggcaccagacaagtcattccaaatatggggtcttggtaccagtcagaacgaggttcccatctgtggtggtttaaaaacaaaatgaccttgttccttgatattctttccattgaaagatgggatatatgacttttccttgagtctgtgcaggcttgtgactgctttatgcagctcctgcctggttttctgagcataattattccagggaaagcactgggactgtcaagccgaagaggtccctggtgggtgctcttgtttgtagcctcagctgagctcccagcatcagccagcaatcctgagagccgccatcttggatgcacatgtaggccctctgcaccttcaaaagtccgcggcccggctgacatctgactacaagggcatggaaaactccaagtgagaagcacccagccaagcccatcccaaattcttgaccaaaaaaatcatgcaacatgaaacaattattgttttacaacactaagttttgcagtaaatatgtaatccacaatagtaatgagaaccccaccttaactcttcctcctatgtactaggcaatcatgagaaaaaccttttttttttaacactctgggcatcaggtttctcatctgtaagttaagagtgataacatatattgatgtggttgttgtttcaagcaaaagcaagttttgtccaaaacctagcacgcttctccacacaaacaatattttctcaaacttaagatgctttcattttacgactcacccttaattcatgtgtactaagaaagaaacaaatgcttccaattaaactactgcattactgtatgccactggttgtaggacacatacctgttttggagatattgaaatttgaaaagatgtatgtcttagcatctttgatttaaagactgattaacataagcacctagctaagcccaggcaaaaaacgagatccccaagattagagtttgtgaagtgtaagaggagacattaaagcaaatgtacctttgtatgaatgtctccaatctgccattctgttttatacgataaaacacaaagattagtacagacatccttgtggtccagacaaaaagtgccttccttgtcagccgtcgaatggttagaattcaaatgacatcatgtcacagttattgagccaaaatgtattttgcaaaagggatgaagtcagatccctaaatctggctgtgagtcgataagttgttttcagcagtaactcatccctagtaatagtaatagtccaagccccatttctctttggttcttgagaatttcctttttttaggacacgaactagtagttccttgagtattccagccaatgggcagaggggggtctaggcagtgggcaaaaggatgacacagggagacccagggccacatctagggggacagaagcataagcatcagcttcctagcaggcttgacgttaagtgttcacatggagctctgcagttagtacggctgccccaagtgctactatgctaatcctcatgtgaaaggcaaacctacttcaggacaagaggggttaagtctcttccccaaagtcacacagcttgattatgtcaacttagaccatcagacaccagagcctgtacttatacccacagcactgtactaacaagaatgtttgcaaagacacagaaatagtcataaaaggctccaacaaacccaaagctcacaccacaacagctgtcttgtcagctttacctaaacagagaatttcttttcatccataccatcttactttgttcagtatgggttttccgataaggatgttcttacctccttctctttctggtaaaaaccaaaacatccttcaagacccagctcaaatggaacagcttaactccttgttcctacagggtgggccctggctgcgtttggctccagcatattgtcccttgggctgcatggctggctctcctggaattgttgggagtggtttctgttgattactcctattggactggaagtttcttgaggttctggagttagactgagtttgactctatgatttacagctatgtccttggacaaatgtcttagctttcctgagctttaattttcttatctacttcccagaattgtcataatgcagcgtctttgcttaggttgcacgatcagtgcccaatattgtttactgttatgtgattggcaatagtggagcatctttgtgcattatctcagtcttcaatagccctctgaggtaggttctttcactaccacccctttttcacagatgaggaaactgaggtgaaacttcttgcccatggttccacagctcagatgtgacaaaactgggctgtaatcgtacctttttaaactcccttccctcgatggaatcccagtgagagcctccatgaactgattgccaaggatgttttgtcatgtatcagtctctttagatgtcttttaattcagatcttaattttccactcatttgtgcctaggtgacattatcctagtttgccggaaaatgatgctgcaaccagctttgtctctgtaaactgtggttgtttacacatttcaggcatctggcaataatgtgtccctcccccaggctgttatgcgtggcagattattaacaccacaactgccgttttagttaatgaatcaaaaacatggatcactcccattattggccttgaaaagctcaagcaaactcttaagcataactaagggcccacatcgttttccaacccaaagaatgccagggctatgcctcctatttactttgaatgattggctcaccaaagtttttgctggttttctgtgttgttgcaatcatggaaaccctctaactctgctgacattcctgatgtgctactttttttttttttttttttttttgagatggagtctcgttctgtctcccaggctggagtgcagtggagcaatctcggctcactgcaacctccaccttccacctcccaggttcaagcattctcctgcctcagcttcccgagtagctgggattgcagacacgtgccaccacacccggctattttttgtgtttttagcagagatggggtttcaccatgttgtccaggctggtctcaaactcctgacctcaagtgatctgcccacctcggcctcctaaagtgctgggattacaggtgtaagccaccgtgcccagccgctacttgttttttttccctcaagacataacagttaaattccccaaacaaaacaagtttgattttatttgccagaaaatattctgagtaagcagaacaagatccattactaaatcaagcctcaccccatacctgggcagccccctcagcaagttaggtgccttgtttggcagaatggtggaggtcttcctgtctaagcatggatctcgtgaaagcccatgggctcagcgcaggggccaaggttaattcacggtcccagctcgtggcgcagacttgccagtgaaagacacactcagggcttcagcaatgtccttggctgctggtttaccttcactttcagcagcagcagaggggttggtcatacctgaggtggagaaagatgttggggcaggggttgggggatggaggtaatattattgaaagcctactttgtgccaagcactgagcgaggttccccatttgcaggtattcggggattgtctacctacttactattgttaacttctagtttctttccattgtcctcagagtagatgctgtgcacgacttcagtcctttgaaagtggttgaggttattttatggctcagtgtcctgtgacgaatgttgcatgtgcacctgaaaagaatgcatcctctgcagtttggggatggagtgttccataaatatcaactgtgaaaggtccagtactcagctggtatagactcactgttcaagaaaaactcgttctttcacttattgccatgattaccagatacacccacaagcaagaggctattttgctagttgtgtagaccagcggtttcgggagagaatgtagtcttcactctgcagtgagctcagaggaggagagaggggaaaagtccatgtgggtgagaaggcactgccaggccctgaccccaggaggcaggtgctgtgccaacttgtcctccatgtggcccaaataagaagaaaaggccaagaactctaaacagatcactgaggccaggggaaaatatcttgagatttgctggagggagggaaatttacccatggaaatgagagaagttatgtgtggtaagaccccttctcatctcaagcacagccaaaactgatctgatcagagacctactgtcttagtccattttggctgctacaacagaatactgtaagactaagtttacttctcatagttctagaggtttggaagtccaagatcaaggtgctgacagattctgtgtctggtgaaggcccagttcctcgttcataaatgattgcttttttgcagtgtcctaatgtgaaggaaggggcaggagagctctctgaggtcgcttatataatggtactaatctcagtcatgtggggtccaccgtcatgaccatcaccccccaataatggtagtaatcccaatcatgaggagggctccactgtcatgaccatcacccccaaaaggccccacctcccaataccattaccctggaggttagaatttcagcatatgaattttgggaggacacaaatgttcagtctataactgggatgcaaggattcaacattgcccctgcccttctggaatttgcaggccatgagggcatacagataattaaacacacaattacgcatagcagggtgtggggggggtcataattggaaaagtatgttgagattagaagaaaatcattctttctttgtttctccctctctctttctctgttacacatatttgcagacaaaccaggaggatttccacagggaagctgaaaggggaaaacaacaggatcctatctataagcctattagaaaccgttagagaatgatttcatgaagagtaaggaacatgtgagttcgctagggcctcacccactaggatcaggaatgcttggaacgttttttgtaccataaacccttttggcaaactagagaagctatggacatcttttcagaataatgcttttaaaatgcatataacaaaatcctcagattttatttcaaaggattgcaaagaaaaccaattgtgttgaattcagttctatgcataggccttcccctccacctcactcaatctatgggatggggacctgaatgtttatggactagtggggagatactttgcagagaaagaaaaaagtctttcccagggccagcagttttctatatttatggaattcgttacctccaaggagggcctgactggagtttttactttcaaataggtttgggtaactccacgcaagactgtctttacctgcctttggtgagcttatggtttctgtttcttttctcaaaagactgcgtgcccaaacttccagaaagcagacatattgatgcagttgaattgcccaccttttacatttcccttattgttccatggatggagtataatgaattggcaatggagggaagagaaaagttaaaggctgactttgatggggggctaagtcctcagagaacgtgtttcttagggagccttttgtcacttgttaggctttggaatcctctttgggagttcaccaaacagagagtgcagcccaggaggatggggggctgaggagaagtcagaggttcagggaggacccaggtcatattctgggaggtggcaggggctgtgggtcccatgagatcagacactagttatgaaggaactactggcagacactttgctcattaatgtcaccccccatgctcattaccaccctaggacctggggtccccactataccactgagacaacagttgctgagcatagttaatccaagatcatccagtgagcagcagtggagctaagatctgattccacataatctaggctcctaaatatttttttttctattgccacatgcccagcgaccttcctgcggcatggaggtcgtgggtgcagcttgtggagtcaggttgccaggtttcgagtctagctcctctatttaaatagcttgatgatcccaggtcagttcctgatcctcctctgtaaaatgggaataattttttcacctttcccacagactttcctgggggattaaagggagaatgtatctaaagctctgagcacacgtgcctagcatgtgagtgctccgtgaatgttagttactgtgattatttttagcccagcaggacagggaggagtgttaggtccctgggggcgatcactcctctgtttactcctcggactgtcccggcctggcaggcgttcatgagtttgtttctcctgtcccaaggttgccctggtgctctgcagtggcagggctgagatgattatacaacctgcactccaggccaagtccggtactcgtcccagctgtcggctaagcctgcactgctatgggtgagggaatcactcctctccagctggctttctcacgctggagaagcctgacctttattcagaatcatcctccagcgcccacatcacacagcaccctggctcacccgctcctcccccaacatgtcctttacattctcatctggggagataatggggctccagtgtccccaagacagctgcttttcctttcttcttcattcgtgataactctctgttctccagaagtgctgcttagactctagagggatacatgaaagagcggtaaggtgacaaagaaaacagctgggttcaatcctggctgcatactcagtgtgggacagaacaagtgctctacctttaaagttacttatcaggataatatacagtatttcatgtatatatacatacatttataagatgtaataaatttttgtaaagttgtgaggatggtaaaagcttagcccagtgcctggcacatcataagcaccccacaggtgtcagctggcatcattagcagtcataggaaaactcagggtatgtctccattccaggctttgtggcatatgggtctcagtgtccccattgtcctgtggggttgctgagagctgtcctcataagattgtgagggtgggaatatgagaggagtttgagaaagctgaagcctaacaggtcaacaaccggactgagctctccccttctcccctgggccgtgtgcaagctttgggcctggtggtgacacctacctctccatcccacctggcgggcccagctgaccctcccagtgcaggggctgggaagctgcaaagaacccttaggctcagaatttcctgctgtcagccagcccccctgctgtttcccatttatttttctctatctccttttccatctccccttccagcaccttctgaaactccctagtcctgtactaccaacacaccaacctttgcttaattgtcacgtcagacagatggctcaggtgtccccagctccctgaagctcttcccttcccctcccctgggcaggggcctcaggccttcctctgactgatccagcccacctcccagtgtccatactattaggttggtgcaaaagtaattgcagtttttgccattacctttaatggcagccccggcaccctggccattggcccctggacagctgttcactcccttctcaggcttgctggggacacatacgtcatgccctgaagcgttccggaaccggtaggggctgcctgtcctgccactcacccactccagctaggaactcctcagtgggcaagataattgagcccaggttgaattatgacgttcacaggtaagaagcagggttcagatgagggctgggtctacagccaagtgtgggagagctggtgaaagccttgagagaggcagagactggccagcctcaccctgcattcccaatcccctcctctttgtcaaaatcttactctcagcatggtgccattacctttaatggcaaaaactgcaattatttttgcaccaacctaaatacttttgcaccgccaggagatctcctgccatctattcagtcttccatcccgctctctggggctttattctttctgttctttctgcttcttgctgcgcacggtgcccccacctcctgtggctgaaatgctgccctctcccatcctgcccagatgcctcttccaccaagcttttctgactgccgcatctggaataatatatatatgcaactttaagatctgtctttcttttttgatcttttcatatttttttatttctattttggttatttgctgccatgttccttaaggaaaagattctaccctcacaatgcctaagcagcttggatcacggaaagagcttgggcttctctccccacttctgttttctcatcagtaaaatggggataagcattgtaaataaccaaccctcttaagagttgctgtaaggcttggccaggagcagtggctcatgcctataatgccagcactttgggaggccgaggtgggcggatcacctgaggtcaggagttcgagaccagcctggcaaacatggtgaaaccccgtcaatactaaaaataaaaaattagccaggcttggtggcagctgcctgtaatcccagctactcaggaggctgaggcaggagaatctcttgaacatgggaggcggaggttgcagtgaactgagatcgcgccattgccctccagcctgggggacaagagcaagactttgtcttaaaaaataaaaaataaaaagagttgctataaggcttgaaagaggcctttggcacgactatcacctccctcagggctctgcacatttttttctttttttgagacagagtctagctctgtcacccaggctggagcgctacagcacagtctcggctcactgcaacctccgcctcccaggttcaagcgattcctctgcctcagcctcctgagtggctgggattacaggtgcgcgccaccacgcccagttaatttttgtatttttagtagagacagggtttcaccatattggccagggtggtctcaaactcctgacctcgtgatctgcccgcctcagcttcctaaagtgctgggattacaggcgtgagccaccgtgccgtgccagctctgcaaggaaccaatgaataagtgattgaatgattgaatggataaaggcctttactgttctacttgaggctgtcaaaatggataggtttttgctacagtcctcaccacccctcttaatgccatgtcagcagcatggcatatggacctgcaaacccaggctctgcatcaggttgccaggtcacctaaatgacagctgtgaattcttctaaaacaggggtcagcaaactatgatccgcaagttaaatccagtccacagcctgtttttgtacagcttgcacattaaggatttttgctactttttaaatgatttttacatagaaaatgttacatttttaaatgtaaatgtaaattaaatgcaaatataaacatttacatttttagatgtttaaataaaaaaatcacaagaaatgtaattttatagcatgaaaattataggaaattctatcattagcacttgtaaataaagttttattggcacacaactatgcttgttcatttatgtattgtctacataagctatagttggtgtgtgcagagctttcactcaatgatggcacagttgagtagtttcaacagagatgggatggcccagaaaaccaaaatatttactacttggcccattacaaaaaaattttgtgctgatccttggtctgtgaaacaggagcaatgatgaatacctacccatcgtgtgtgggtaaaatgttaaagtgcttgatatcaagtgggcactcaagaaaagtttttccttctactctctattcctccctgtcttcattccctttcacagagggctcttttatttcagggtccaagccatgaaaaccatagaaaaaggatgacagggagaatctgaaccagtaccatgcccataccaggcctcaaaacagcagagctgtgtttgtcatctccaccttcctgctccagagcctccccagacctctcagtctatgggactgttggtggacaggcagagtttaaatccattgcgtcttttgcgtctcgtggttccagatgtggatggggccagccctgcatgaccagccccggagagcaacttctattaggtttatcagaggctggacagcgtccactgcatcttttcttgctttgggcgttttaaaacttgggctgctgttgcataggagattgcagctgcagtttggcttggcttaagataagatgcagcctctgggctgaaattgagggtcctgattctgctttgagagatggtatggcatcctgaaaagaaccgagatttggaatctgggctggaatcccagctgtgcccctcacaagttctaggattcgtaccttttgctttttctgaaaagtgggggtgatgctttttcttggggtgagggtggggtgttggcagggttctccaccacgtaagcttgagggagcagggttttgtctttttctgcactgaagcccagcttctagaacagtgcctggctgcgggtgagcactcggcaaatacctgccttagaaaggtgattaaaagatgtagagttcctggcacacgatagaatctcattaagtggtcacattgccattgtctgtactcaaccaggaattggcacactatggcccacagcctgtttttgtaaataaagttttattggaacacagctatgcccatttctttacatattgtctgtgactgctttcctgctatagtgggggagtggaatcgtgagacagacctgtgccctgccgagcctaaaatatatattgtctggctctttacagcaaaactttgtggtttctgctctgaatgtcagggtaaccctgtctgaggatgatcacggatttcattttcccttgtttgttagcgttgcggtcagccgcaagttgaaaacaaggaaccagcttgaggtacgcattctcgatgccctttctaagatacttatggagacttttcttttccactccaattctgccatgctctttcggcatggtcagagctggcttctctgtgccctccagatctcatatgtaagatggtgttactttcatttctttgtaaaaagaaactcaacccacctgtcaattgctggtatattcattagggattaaccatgggtcctgcaacaagtaggctcagagcacagaggacatgagtcaaaataaaaaaagataaccaaccaggtacaactgtgctttgtaatattatagaatagaatgctgatggggttcaggaaggagtccactgtgtttgtggggcacaggatacataagattctgatttacttttccatcatggtgaatggcatgatcttagacaccttagttagctttattcaaactcagtttttcaatctgtaaaatggcaatgttcactatatgttgtcactctctttgatgggcagggcccacagttaggagcctctcgaggccttggtatctagaatggtgaaggagagctttctggaatgagtgaacatgtgtcaaatgctctgacgtcctcatttgaagggggccctgtcccctgtaccagctgagcaatgcgagtgggccactgtcctgctaccattttatagtcagcggatctttttttttttctctttctctccagaaggacagaataacgggctcccagattcacaagccccaccaagaggatcaccccaggaacgcttggaggctgaggagttcactgaggctactgcatcttgagactcaggatgaagacccagcttggggctgtcaaaggtgcgacctgccagctgagacctccaggggtcgagcccaggcccctttgccttgttcatggcttaggccagtgcttagcatatagtaaacaacttgtaaatgtttattagaggatgtatggtgggtcatcccttctgaatggcacacagtccattgtcattgtcctcagaggctccagcctcaggtgcttcttaaactgcgatgggaatgatggcagcagatgggcccagggctcagcatgagagctcacagcaggctgtgctccaccccacccaggcccccagtcttgccatgtttcctctgcctccccaggctggcctagaaactgcttccaactgaaaccagccaaatgcctgcccctaaccacacctacaactctagggttacctttagtctagatcaggggtccttaaactgtagcctttgctgggtacagtggctcacacctgtaatcccagaactttgggaggccaaggcgggtggatcacttgaggtcagaagttcgagaccagcctggccaacatggcgaaaccccatctctactaaaaatacaaaaattatccaggcatggtagcgcacatctgtaatcccacctgcttggaaggctgaggcaggagaatcacttgaacctaggaggtggaggttgcagggagctgagatagcgccactgaacctccagcctgggcgacagagtgagactacttctcaaaacaaacaaacaaacaaaaactaagcctttgggctaaatctggtgagtgttctgtgcttgtaagaactctgagttaagaataatttttatgtcactaaagggttgaagaatacaaaaagaatattcagcagagaccatctggctagcaaagcctaaaatattgaccctctggccctttacagaaaaagtgtgccagtcgcaggattaggcagtactgaccacaccccaggctccctgtgaaaatttcaaccacacagactcatttcctttctcttatcaacactgaggcaggtgtgattatcattccttgtaaacatggagaaactaaggcatggagaggtttaactcgtttacctgagaatctattaagtaacagagccagggttcaaacccaggcagtccagcttcagagtccatacttcctagctgcactctgggccttcagcgtagggatgagcttcagacaagaactcccctcttaatttctgccctctcctgccccacagccagtggacaggcattttgcaccccagcctgcccccagccagctcctactcagagatttcctgcagggacttagacgaggctctgggaccaccctccttttctgccctacccggcacctggaactctgcttgatcctgctccctctgaggctggacacatctccatgagccaggcctgaagttcttcccctctctggacctcggggcctcccttcctaggggcagttcctgtgtcccctctactctctgccttccccccgccccaccatgtccttggggctggaattgtagtgtgcagccttgggaacagggctgggctcaggggttgggaacagaggcccagggctctggctgaccctctctcatccccaggaggagaagctgctgtgtttagagtgtcacaaagaacagtgctggaggcttcagaaatctcgggagattctgaacttctaggcggagcagatgggatggtgcctctgtgatcaacaggcctggcagaggggtgcaggagggggtgcgaatggaaagacagctgccaaggggaacggagagcttttcaagtcacccttgtcccctccccaccccaccatcagggctaagactaaacctcaccatccggttgcggcctctcggccctggggatggagattagtacatgtagagtggaggtagagaggccatgttctggttgtgtgaccttgcacaggttacataacattctgtgcctcactttacttgtttttaaaatgatgaagatgataactacctggcagcgtgtcttatattagagataatatggttcctggcactttgtaagcactcggtgtgaaattgtcttctgctgctcctcttcatcagtccacccctcctctgcagaggtttcctccatgctgagcaagctggcagcacctaaattcctgttagtgcaccctagtgccttctgcccaggcctcgggacccccagggatcctggcccctgtggacagggacttttgtgccctccttctctgttaccagcaagagtgagtcctgcactgaatttccatgggatcattgcttgctaacatttgtgagtgagttactgtctagaaagcagcttttctggacttttcccattaatttcacgaaagttatcttcctttgcccttactacatgttcattactacaggttcattaccccattttacagacaattaatactccgagatgaagtgactcaccaggggtcgcctagctaagcagtggagagtgggcctcccacccaggccttctcactctgactcctgttctccacgtcattgcatatggcgacatgcgggtcacgtgatcacacatccctagccgatatggaattgtgagcttctcctgggtcttccgaggaaggatgctttcaggagtgctttggaatgaaggcagtggaggccaagagacctctaggtcaaagccaggcgggagggtcctctcaggggcccagccgacaagttgcatttctccctcagaggcctgaagaggcagaacaccccagaggagcctggggccaccacccagcatcactgtgggaaaacggcagcaggaaatgtcctctcgcctgcgtgctccacctcggtccacgccttccctccttctggaagccttgcctgaccactggcctgccccttctatgggaatcactactgaccttgcagcttattatagacttatatgtatgcagaaatataattttaattacttttatattgctccgagagtgataccaaatcatgatagaaaatttaaataaacaaaatagccaaattaataccagtaatcaccccagtcaaatatacccagctcacattttgatgtaaaatcttccagtacagtttctatgtacatatatatatttttaggaaggagattatattttacatgctgttttctagaacgttcttttaaaactgtatcataaacatcttgccttataattcaatagtcttctacaacaaactttgctaatgaatttttttttttatcatggtcactgttgtgttatgtgcatcttagtttagcatcttcagttacgttataagtgtcttaagccctcaggttccccagccagccgcagggtgggtttgttcattgattgatggctgtatggggtggaggagggaagtagaaagtgagtgagatttgggtaagcaaacctgggtttaaatgctgagtctgcaaattccataaattctccttccctccctccctcccaaccttcctccctccatccctccctcccttccttccttccttccttccttctttcctccctcccttccttccctccttcccgaaacaaatgccttgttagatattttatatctttatgtaaatatgcactcatttaaatatcatgtgggcacctcctctgagtggccctgagcttggttcttggatgtagcactgcacaagagaaaccaggtctctgctctcctggagatcgatgcatccagtgtggggcacagactcaaatcaaggcaatagaccaaaacctaagcaggccactaacttgtgtttaagtacaacatccacatggacgggaatgagaattacagggggagcacacttgagctgcggtccagcaaagccctctctggggaggtgacagtcaagcccagacctaaaggaacctgctgcagggaggatgggaaagatgttctgacaaaggccttgagatggggaaggctatggtttagatgaggaacttcagttggtcatcccctctctcatccatcctgttgaaaccacctttgcaaaaggtgtgtcaatgagaaaattataacagtaagctaagccaacccaacctccatcttgcctttctcttaattattcctgggctattgggtcaagctaactttggaagacatttaggctacagtttaaatgataataggccttgcccaaaactcagccacttttgtaaagctgttagggggccatcagggtgcggggaggagaagagcctgaatcctactaagctgcagacattattccgaaggttataagatatgcaactttcccaattgctcctgtgaataacactactattacagattggccttttgaaatatctttccaggttttttgcatgtctgacacccatgactccacctggaccttatggctccacccagaagcaattcagcccaacaggaggacagcttcaacccattacgatttcatctctgccccaaccactcagcagcaagcacctgttacctgtccacccccaccccttcccccaaactgcctttgaaaaatccctaacctatgagctttgaataagatgagtacgaacttcatcgcccacgtggcgtggccggcctcgtgtctattaaattctttttctactacaatgccgtggtctttctttatgcagtgggcaggaataaccccttgggcagtaacaaatttggggtctcatgtgggattgtgctggtggctacctgtgtatgattcggtagccccccactggcaacaggcctggaggccagctcaaacggctgcctagttctcctggcagagagatgggggctgactctggcaccatctctaccggcgggacactgctgaccatggtgcatggatgcagtgggcaggaagaatctcttgggcagttatgctatctatccagtccatctgtcaaatgtatccagactatgacctcctctcacttcttggtcgaagccaccctcattcctgcctggaatttttgtaacagcccctgggctgggctcccagcttgtgcctttgcctctcagtctgtcttcaaaacagcagccagggtgatcctttgaaagggcagccagagctcataagcccatttgcttcaaaaccctcaaagggttccacctaattctgagtaaaagccacaggcctcactgtggcctgcgaggcccgtgggatgcagccctgtgatgtctctgatcacgtcctcgtcctttccatctcatttcgccctggcatcctggcccctttgtcataactcagaccctccaggcatacttctgcctcaggttctctgcacctgctgtgtcctctctagcctatttgtccacttcctcatcccttctcagtctttgctcgggtatcatcatttccatgaggccttccctggccaccagatttaacactgaaacttccccacatcccacgaagctcactatgctctttgctggttttattttcctccattgttcttggtgtctcctaatgggttctacaattaattgtttgagttgatttattagtttctcttactcccctggaatataaacttcaagaaggcagtgatttttgtcttatctctttccaagaaaagtatctgtgacatggtaggcactccataagtatttgtaaaacaaataattggacttccttataccaaagacagtctgcacagaaaacaaatctttacttcaagcacaaaccttttgatatacatatatatgtccaagttttccttttttttttttttttttttttttttcagagaagggccctttctggtttcccctgctgcccatcaggatgcactcaggcagcaactgtacagtaaaaggggacacctttagcctctggtttcccagagcagagagctgtcaacaccataagctatttttgcctcacctctggtgctccggagtggcaggccagtcacaggtgtggtgcatcagactatgaagaggctgggtggccacaactctgtgctgggatgctgacctctttgaggcaaacagcatgagctggaaaaagtgtgtctatctcagagttaaaaactggtgaattcccctgttgctctttaccatctcctgggtccgtatgatctgactgccacccactttcccctttcc

SEQ ID NO: 493 - DNA, 23656 bp, Homo sapiens
  source 1..23656: mol_type = genomic DNA
gggcaggggctggctgaccctggagaacggggcgccttgaggtgcctgaggccccaggaagggcttagtgttggcgggagccccaggccacacagaggaggacagacactcactgggcttccaggcctcctctgggactgtccccggccagaactctggctcattcggcctcggtccctacccctgttctagccggacggtcaggtgtcccaggccccgcgggctccctcactccgccctggctcctctctgaggctcccactgccgcgcggccgccggagggcgaggtcgacaggcgccagcgacccgacggtccccagtggcaccaggggcggtggtcctcaattcccaggctgggaggagccctgcccggcggcgctgggtcgccaggacaactacgcggtcccccgccccgcctccaggcctcgtcaggcgctgcaagtccggctcagaagcccggcccggggccaaggtcaccgcagcaggccgggcccctgcgttctgagccgggtgcggacgtgctggtgctcggggaagtcgggggctttgacgcctgaaggcgcgggagccgggcgcctgggggaagggggtccggcgccgtcacctcccactcctcgcccgcgggtcggggagcccctgccgcgggggaaggaggctgtttcctttgtaaactggcggaggcgcgcctggcccctgggcccggcaacccgaagagacacgcccgagacctccggagggagttaaccccccgggccccggtgccggccacccccaggcgcgcagggtggccctgagccgggcgcgcgcccgcttgtcgccccgagaggcgccgagcccagtggggcgacccagtgtcccgccccccacgcggcgagggcgacactaggccgctgcccccgggcgccccgcgtcccctccgcctgccccggcttcctgcgcgcgccgcccgggacttcctcgccgcagtgcccggggccaccagagcccagcgcggggcgctgccgggacacgcgggcggccgaccccaggcgggaggatccgggccaccggggagggagggagggcgcagggctgggcccggagggggaggggggcccgggaccggccccaggcaggggagcggggggatggggtcccggggctccggccgcggcgggtgtcccccccgccgcccccgggctcgtggctctcgggtcctcccgagccaggggacactcccggccagcgtgggccgcgagcccgggcgcagccccctctccagcccgggggtccgcaccgcgcgtccggccgacctctgcgggcgggcgcggcttctcccgggacgcggcggcggcgggcggggtccccgggagcggagcccgcggccgcgcgcccccggcccggctcggctcggctgtggcggccgccccagcggagctttgtgacgtcaggcggccgcggggcggcgtcacgcgcggggctgacccggcggcggcggcggcggcggcggcggcggcggggcgggggcggcctgggacgcggcgggagcatggagccgcgcgccggctgccggctgccggtgcgggtggagcaggtcgtcaacggcgcgctggtggtcacggtgagctgcggcgagcggagcttcgcggggatcctgctggactgcacgaaaaagtgagcgggggcgcgggccgggacacccccggggtccccacgcgacacccgcctccgccgcccggagacccgggacccgcctccgggttgggggtggcgtggccccggcgcccgctttcggtttctgccgagcctgagtttcggggcgcgcgagcgcggccgccactcgggggggcaaaagtggttctcaaagtcgtcgcgacttttcggggcgggcgccgggccggggcgggccggggcggggggcgcggggccggggtcccggaactccacacatctgccataattaatgcacttttctttgttcagagccactgttgaattcgactgttggcagaattgtcgttaaagcaggggagggtcagatgcgccgtggccttgccctggcagttcctcacaggtgggggtgccctgtcgaaggccacgggcccctggctgctgggagtgactccgcggctgaggtttggattcggggagagcagttgcgcccagctgtgcgatttaagaacagtttcaggccagggagccctgagtcatgggggcgtgaagaggtacaagctgtgggagccgtgggcacatcccccgggagccctggcttcctgggtggggggcgcagggcagggcggggcggttcctcctgagaggcacctgtgcacgggctgcagggacccatgcggtgcagatgagcctcctggacaccgcgtcacatggcagggagctgtcgctgccagatcaatgattaggcatgaatcaggctgtggcctcgctgcgctcctgcagggctttcttttgaaactgggagcagggaaaggctcctcttgtaaaggcccaactttttccatccgtggagcccagatttttgcctggtgacatgaattagcagagaggaccgtgttccttccacaattatttcgcagacgttatctcttcattagatgtgccagaagccatttatccacaagtcacgtgatttaacatatggctcccgtgtggttcctgcccgctccgtgtgggctaccgctgggagtgcacgggcaggatggagggacactcggggggtgagaatcgccacctgggagctgccatcccctccaccatcggcctcagcttcctctggcgggcagggttgggcttggtcctggtcagcagggccgcacccctgccagacctgcaccaccttgcctggcctttcctccctgaagaggggcacgagcggcagtgggttgccccatttcccaggttccttgactcgggacaagggaggctgagaatatctgcagtggcctcgggctctcctccctgaggcccatggctaacctggtttgcaaatctacaccaccgcctccccttcatggaaaaaaccaggcccgatgggacccccggcgtgggaactggcagctgtaggatgcatgggtgtcaaccctgcctgccacgttcagctgtaaccagagccgcccacggagccgggcgctgggcctctgcgggcacagccacttagcagccaaccttgctgccttgggctggcccccttgtccttgtggggaatctgaaggtagagcaggctccccgacccccagtcctgaggcttgtcctggaaggacccctgccccctccctcatctcccctgtgcctgagtctgtccggctgttctcctctcccccagccccagtcctgaggcttgtcctggaaggacccccgccccctccctcatctcccctgagcctgagtctccagccggttctctgcccttgtattccgagtcccagggctcctgtttccagccctgcctcggaccgcagggtgctgacctgccttccccaggtgccagtttctcatcagggcgtggtgcccgcccttatcccctgcatgtgacagtggaggcccagtccccaagtgtgggtgctgactcacagggaagagctgctgggagccctatgacaggtgtccgcccacctcagggaacctgtgggtcccagcacaaccggcgctgttgagcgcaggcggcgggcagccaggcacctgttcagagcaatcccacgggaatggcggccccgctcacacaggcgccgggatgcagggctgaggtgggcccagcagccagcgtttgttgtcggccggtttgggagatggcattctctcccttgcttgcaaagcagaggggagaggggcttggcaggtgggtggaattgcctggcttgtgccacaagggccatgtgatctgaagcaagattctcttgagtgtcagcctgcgtgtacatctgggtgagttcactgcacacctactgtgtgccaggaagtgggctgagcccggagcaggcggcctccagtgatcttcccccagtctgggccaatgtggtggtggttccttccagagcatcgatgacacaagccttgtcctgacctgcgttgttttgtgggtgatttggggacatgcttctggttgaggatcttgggtggggtggccctggctgaggggtggcctgaggacagacgaggctccgagtgcggaagggctggcctgccccaccagagcctcctggctccatctctgagctggtatttatcggcctcccccagttgtgggttgcctatggttccagacacagactgctggaaaggtcaggggactgtcctctgtgaaccacaccctaggccagacaccctggcccacactgagaaccccagacactgcctgtcccggcagaagggcaccctgagctctgtcctgggctcacctgtccaggtggaggctgcactgctgggggctgctcttgggatgattcactcaacaaccaagcgggggagcacctgggccagggctgcagtggtgataggctgtgccccctgcccttggggagtgagagggacacaggcctagtgcattgaaggccagggcaccaggaggcctggctagcatggctggtcttcggagcgtctcgaggggatggcatctgagtgagtgggtaaggagggtgtggggtgggggcctggccttgtgctacttggggagccccacagggcttagagagggactatgctgacggctcataaacccttgagtccaggacacagggggccggccgtggccacctggccccacctgctctcccctggagatcctggggcaggtgcccacagggtgaggcaggctccccttgtggggccttggaggaggcgctcccctggtgtctagcctgtggcttctcctgccagcctgcttttccctaacccctgagagagttggcctggggagaccccactgcccccagcaggcctgacctgcccgcccttttcccgcatgctgtcctgctgtgggtgtctgcagggctacagggagactgcagacgctttctagactgacactggagcatagccgaggccttgggtgccagactcaggctgtcctgcgctgcgctgaggctgcctgttcctgttccaggagccgcattttctttacctctttaggccacaacagggtgtcctttcctgatcagagagtgaggaaggaaggtccagggtgaatgtgggcccgggaggccaggcagggggctgccatgtgggcatctgccatctcatggccctggtctgtagaatggggaagccgtggggaggcgctgccagcgagtgcagggggcttgggcaggcagccagggctgtgctcctcccggccatggtcccgggcagacctcaggcctgggcctttctgggagtttggctgagcctgacatccaggcgaggccccagggccgccacggctgagttaaggctcggccacttgtgtctggctgaggacctcaggcctggtctccagggcccccgtgtccttgccaggacactgctgtgccattgggagtggcactggcgtactttttgctttggggtctggtccgttctgcaattagagactccagggcgtctcacccctgcctcagtttccctagccctttctcaaagcaaaggttatttgttctgtccctgagctcgcaaggatgtcgcgtgaggcttatttcaaggggcccctcgcatgtcctcttccccacaggcagggcccccatggggcccccacatgtccttcccttccccacaggcaaggcccagcggatggctctaaaagggcagcctggacccagcaggcccatctagctccagggccactccatcttcccacctgccaaggctcggtgttacctgtgggtcacagccaggccagtggggcccctgtccctagggggtgggtgtgtggggaactacactgcacctgtgcacttccagaaggaccactcttcacgtcccagggtccaggataagccactgaggttctccctgtgccagcgccgtccccgtgcctggagacccccgtgggtacccacccactcagcctggaggcacgttccctggtctcgctcggcctcactggccaatctgcgaaatgggaagactgtgatctgtatctcatggggttgctcaaggagggcaggagccgaggtcccagcagcctgggggctctgctgttggctttgcaagatccctagggctgggttcccctacccgtcccagcctgcggagtgagctgttcccaccctgttctgttcccaccctgtttacccaccagtgcgctggggtgcggcctgggcagggcggcagctccaggaaggaagtatggctgcctgacgtgccagggtcaccggccgtttttgtagggctggcttgtccagtccctgggcactgatgcaggtgtgactcagggtcccaaaggggatggcaaagctcaggctgccccccacccatttgatctgcctgggaagggactaacccctggcctgtggctgaagatcctggggcaagggatggggctggctccgtttgtggggcctcctcagggtcctggcaccttcagcccagtccacaaccccgagtggtcagggtgccatgttccccagccctagtggggttgccccctccctctggctgtcgtagccaccgtcctctggcagggatgcttctgctccatgggaggccttctccttgccaacatcccctcatttgccctcatttgaggccctttcattgggtcctatggaggggttcctggctcccccaacagcaaggggccgtaagcatgctggcccagaagctcagggtgcctgcgtgcaccagcgggcgtgtgcaccagcgtgaggagtgtgcatgcacatggacgtgcttctgtgtgagcacacgaagttggttctcagaatgctcagcctgtattaaatgctcacaaggtgctcatggaagatgatgaactggctgctgatttgggtacggaggccagttctggctatgaggccaggggacttggagacatcagcctgcaaccctgggcgggggtgggggctggttttgggcaaaggctcatcttccacagcttaactctggcaaaccttttctgtaagtgaaagtcgccggcttgggtggccccactgtggcctggctcacggacagcgtataaaggaacctgggggctgtgctgtgtgctagtaaaactttcttcacaaacgctggagcggccaggtgtggcccgctggcccccggggtgcatggggtctgtgctcctcggtcctggcgccagcacctggctgggactggtgagggcaccgcccgggactggcctccctttctcgcgaaagtcttagcccatcagagttgaaggcagcccgcttcccacggctgctgcagggctcagtgagaccatttgcacagggggcccagcccgcactccagagatgctcctgccgttgctagcccgtggctgcaggccccacagcggtgcctggccagaggagaatggggcgggtggcgctcactctgaccacccccacccaccacagagcagaaccccccgccccgtgttcatcccctcacaggccccaaggccactgctgtgccctccccggcgagtcgcaatgctgtgttgcttttctgtctctttctctccatctccctctcttttttctctggtttagctagagcggtcttgaaaattgcatctggtttgttaccagttacgcgtgttccctgtggaaacgtggattctgtggacccgttttccatggtctgtggtaacatcagcgttcgcagaactgttttcctgacgcgctcacagcagcttgttgggcgggatgaggccaacaggggacagggctcggggacattggctgcacttgggcctcgagaatgatggggcagccaggtgcccgtgcagcgaggtggcctgcactctaggacgtgagctgcttctgaggacaaatcccccaaagccacgcacagtgctgggcactagccgttaagcgcaggctgcccggcccagcgagtcccaggatgagaaggcctttacaactgggattggtgtcccggctgtggcagccgcggggccttaattgtggctcccccagcagtggctgctcctgccccctgtgccccttcccctgcagctcgtgtggcccagcagggcaggacctgagggtgccaggtgggcagatggggatgagggctctctcggggccactgaaagcatctgggccatctccagagggctcagccccgggccacgcgcagccccaccccagacacacgtcatgcacctggaaccctgctcccgtaggacggcattctccagggctcctgcaggacggcattctccagggctcctgcaggacggcattctccagggctcctgcaggacggcattcttctgggctcctgcagggagctttctccaggggcttgctttgggggttgaagcgttgcctggccctaggggttgtcttccctgagtcccccagcccctcggagaggagggaacggctgagcctgtgagcaaggagcctgagttttggggtccagggccatgggtcacaagcagccagacccctccccgggccaggtcaggcctcctgggagcattcctgctggggtccacatgtcccctggggccatggactgagattcggagcctctgggcctgtctctggccagggaagcagctgacctcccggccatatgctgcttggctttggaaggcacatgtcttgccctgctgtgtccaacccaggacatacgtagggagcatgggcattggtttaccgtcctgaaatacagccctggactcagggcatggctcgctgcccagacctgccggagcatgggtcgggggccttggctctgggggctggtgcgggtggcagatgtgccagggtcccttctcactgtggtttctctctctccattgccaggtccggcctctttggcctacccccgttggctccgctgccccaggtcgatgagtcccctgtcaacgacagccatggccgggctcccgaggagggggatgcagaggtgatgcagctggggtccagctccccccctcctgcccgcggggttcagccccccgagaccacccgccccgagccacccccgcccctcgtgccgccgctgcccgccggaagcctgcccccgtaccctccctacttcgaaggcgcccccttccctcacccgctgtggctccgggacacgtacaagctgtgggtgccccagccgccgcccaggaccatcaagcgcacgcggcggcgtctgtcccgcaaccgcgacccggggcgcctcatcctcagcaccatccgcctgcggccgcgccaggtgctctgtgagaagtgcaagagcacgctgagccccccggaggccagccccggacccccagccgcgcccagggcccgcaggaggctgggcagcggcccggacagggagctccgcaagccggaggagccggagaacggcgagcccacggctgcggccaccgccaggaggagcaagagggagaggcgcgaggaggacagggccccggcagagcaggtcccgcggagcccggtcatcaagatctcctacagcacgccccagggcaagggagaggtggtcaagatcccctcccgcgtgcacggctctctggagcccttccgtccccagcaggccccgcaggacgacggcagccaggaccccgaggtgctggacagagagtcccgggaccggccgtcctgcgcgccctcggcctccatccccaagttgaaactgacacggcctgtgccggccggcgcggacctgccgccccctaagatccgcctgaagccccaccgtctgggggacagcgagcacgagcccgtgtaccgggccgagctggtgggggagctgaacgggtacctgcgggacagctcgccggcgccctgtgcggacggccctgccggtgggctggcggacttgtcttctggaagttcgggtgaggacgatgacttcaagagctgtccccagggtccacagggacgcgagggcttggcttttctcgtcagctgccctgaggggagagcggactgtgccagtgagtcggcgtgcagcagcgacagcctggacgaggccagatcgtccggctcggaagggacgccggcagacacgggtgacctctcgcctggccacggcgcgtcagcgccctcggtgtccagagaggctcgccaaacggtgccgcccctgacggtcaggctgcacacacagagcgtgtcggagtgcatcacggaggacggcaggactgtggccgtgggggacatcgtctggggtaagatccatggttttccttggtggccggcgcgtgttcttgacatcagtctcggccagaaggaggacggagagccgtcttggcgagaagcgaaggtctcgtggtttggttctccgactacgtcgttcttgtctatttcaaaactctcccctttctctgaatttttcaaactgagatttaatcgtaagaagaaggggatgtatcggaaagctataaccgaggctgcaaatgccgcaagacacgtggccccggaaatcagggagctcttaacccagtttgaaacgtaactggttccctgaccaggtgagtgtgccagcggcagcctccttccccccagcggcccaagctcacacctgtgtccaggccatgcctctgctccgggccctgaggcccagggagccgccgcctgtgcccctcagctggcttgcttggggccccagccgtctggaaaatggttgccctcactggtgatgccatctgcgcttctgattcacacaagaggcgcactgcaaggaggccagccaccgctggtgcttgttggaagcacacagcgagtttgtgtttggcagccatttttcaaaggccggaagggagcttctcatgctctcagtcgttgtttggagtcagggatgtggtttgacggatcctggggaggggagagcccaggctgaggccctgtcttgcgttactcactcagggaacaaactctcactgctctttccaaagatcagagcgggcatctccctcctcctgcacgcggataggccatcccaggacattaaaggagggagggcgaggtgagcttcccaccctcagatgaagcccccaccccaactccccagactggcccagccctgccccctgtgaccccccaaatcttcctcctgggtcagtgcgcactccgtcgtcagcaggctgtgtgcgtggccaggcgcccgggacctgggacatggtgtgggggcctgttcccggggacggcgtctcactgtcggcctctactacgagcactttctagaatctccagccaggccttgtgtggattctctgtgcctggggggcactacgctgtgtggaggtgtgggggtgtcaccttgtggggctgggggcaccacccatgcccctgtaatcaccacgtggggcatccggagcctgccgaggggctgttttctgccctgagctcctgaaggccactctcccagctccagaggccttctcagcacctcctagatgcccctcttgtcttcccagcaggagaaggcaggccagggagcagtcctttctgggtgggggcagctggtggccctctgtgctcttcttcctggctccatggcctaaccaccccatggatgcagagattccagggccaggggctgtacgcagagggcaggggcagggctccgcctaggccttggtgacgtctggtgaccttgtcttccctggccacctgcccagaggccttagagtttcccaggtgaccgtcctcgggcctttgttgggggcggggactggagcgcctggtgcccctccactgctgcaccctgcgtattggggttccggcggaagcagtgatgagagaccactgtggttgagccagggtccccagggtccccaggctgcctggctgcccaggctctggcctggcctcaccccctccctccagccacccggctgcatctgccttgctctcctgaggccaggcacaaacctggctgctccccccgccccaggaaccaggcccttttctgatcagttctggggccttggggcaggcgtggggcaggtgccttgttggcgagtgggtgtgggtgccgtctctcagcttgagtctggggagtgtctcaagccagggcaccatcttctgaggggtaggaggagggtcagaggactcccgtctgctgtcctggggggccctccccgagttctggactcaggcatttgcgaggcatgacatccccccacgcaggacgtctccaagtgaggcctgaggccttggctggcagggagtgcccagccgggagggaggacgggaggacacagtcttgcaggctcagggccggctgtgtttatccggaagtggaggaagaatctcaccagacgggtttgcctgcctccacggggggcagtgcctgcacacggggcctgcgccgggaccagccccctgctctgggagtgggggtgccggatcctttcagcaccaaagcgcagagtggtgtgtgcctggttggctttttggtcttatttcctgagggctaaagaccaagtgctcagtgtgatcagagctggtgtctcgtggggcctgggatctcccgccctctgtggggttggtggtccttgagggacacgtttgctttgaagtgtcagcagcgcacctctggtctgctctttgtaggggaaatgcgggggtacctgcctttcctgggaagggggacccgccaccaccatcgtgaaggcgcctctctgagcagaggctgagtgaggtgtggggcgctgctggccatgcccgagggaggggcgggaggaggaggctggtgtgggggctggagctcgggcagggaggccttccggggaaggtcgtcctcccagctcccgcccaccggccaccctggcctggccccagccgctcctgcagctgcccgaggatgaggacggggatggctgggcggtgtcagaagcttcctgaggtttgtgggtgtctgctgcctgaggcacttgtcaaggagcagtcaccgcaggcaccacgagatcggctccgttgcagggacactgagcccagcatctacccatgagagacccctcactctctctcagcttgctgcggggctggaggccctgctcaggggtaggcggatgccccacagaccacagggtgccagggcattgggcctgtggccggcagtgccaagaggcagcctggctggcacaagggacgggcacatcggcctcagcaggggccgcgccaggacgcatggctgtgacacacttgggcacccctccgtgtgaggtcctgatggaggtgcgccgaggctgggctggcctcctgtgcaggaatagaggccgttgggccttgtcccagccggtcacctgctgttgcggtctcagggagccaacacctctgagcctgtttgttcaccgctcccagggtaacaacaggtcccgcctctgagtgagccgcactccaccccggtggtcacggccggctccagggcctgtgaatggcctgtggccgctgcccttggaggtgaccactgtgccctctcaggctggcaggagaggccgttccctgggacttctcctacacccacagggaccccatgggattagagctgaggtccggggcgggggcaggtggtggagaccaggctctggggttactgtgcctgggagcagcctcctgcttcaggtgcaggcaccggacatgcagggtcaggggcccagcaggagctgcctggccaggcttgtcctgcagctgggaatggggacccagagaaggcaatgccacccacacccccaccaccgcctgggcccaccgagcctgagaggggaaggcagctcctccccagggtgagccccagggcctcgggctggggtcctgcccctgtccaggctcaaggtcctctctctgctcccctggtctctccctcaccacccacccacccacccacccacccacacctctactgagggccaagcactccactgggcccaggctagaagggggccaaatggggagggctgtgaatcaccagttcccaaattagtgcataatcacacacaggaactgctgagaaggaagggaagaggggcttgaagcagagcatccagcgagaaacctggcctggactgggatccgggaaggcttcctggaggaggtggcaggagccaggatctgaatggtgagctaatcaggagctgatggggtgagggtgggggcaagtgttctaggcaggaggagggcagggcatgttccaggggttgcggaggtggtcagggggcccggtgggccaaggcacagactctgggtgctgttggagaattacagacagaggagtgagatggtcttgttattatttgtcagttaaaaataaaatgaaactttaaaaaaatctgatagctttacaaataaaagcagtgacctccagctgtgaggacagggagagtgacgggggacggggaggctgggcggtgtgcaggtgtcgctcctggaactaggggagccacggtctgtgccccgcatcctcaggggtggctccagttctcgggaggtgcctgaggcctggctggaggcatctcaggggaaagctcagaggcgggtcaggcagagggctgggggcaaggatccgtattcatcgggggggacctgggccaggacaatgcttggcggggagctccacagactggctgcttgaggcagaggctttggagcagcagaggcaggtggagatgacaggtgactggatgtgtgcactgtgcgggagcaggaaggagggtggcggagagtgggtggcactggccagccgtgtggggaggacctgaggggctcgggaccttgcccgtcctgcacctcagcaccactgcaggggaggggggcgtgcccagaggggcggcgggctgcctggtgttttgggagccatgagggccaatggggacacctggtcctgggagccgtgagggccaacggggcacctggtcctgggagctgtgagggccgacggggcacttggtcctgcacaggcacctcctgtgcttccctgtcgtggccagggcaggccgtgctccaccgacgtgcggactggaagctgggcacctccctgaagtggggactcaatgctctcctggtgtcccggcctcttgggcaagggggagatttcacagcttccagacagtgcaggctggaggggtccagcctcctgtggccccaggggcccaaccctttcccctcctgccctggcaggggacttttgggggcgtacccagcacagcctccgtcagcagttgggagcacggggtttctgcgccactggacggtcagtgttcctggggtcgtccttgtcttctgtgagtttcctgtagctgctgtaacaaacctccacacactggggctctgagaccacaggcgtttattcccacgcctctgggggtcaggagcttgagtcaaggcgagcagggctgtgcgccttcagctccagacaagaatccctcttgcctccacagacctgggggtccaggcttccccctctcatgaccacgtcgccccaggctctgcctccatgggctcaaggccgctgcctcttcgaagtaccctggtggcatctggggacccgtagatagcgcgggaggggccgctcatctggaaaccctttaatcacaacgcaaacacgatgtggcagaaggtgccattcccaggctcccaggacgaggagcacccggtctcattcactccacatccccagcggttgtgtgggcagcgcgggcacagcccagggtccacccgagcctcatgtccgacagaagggaaggccccaggaagcaggggtggagatgggcttcagcccaggggcccgtggggcaagggagggacccactgcttcagaaaggtccgctgtgcacaggccatgggggcagcatgggccgcttccgaccttcagcttcataatgttgatttctcctgggaaataaagataataatcaggaagctgcccggcactggagtgctgagtcggcaggagccgctgccgggacttgggagagtgtggtgctcactggagtctccgggccagaagcagcgacgccgccgtctccaggcttcggcttttctgattgatgttttccttttagaacagcgtccttgagcttcctgcacaaaacttgcttttctcttcctccaactctaaataaaaacgctcttctgcttctgaggacgggtttctcagctgacttccctgcgttgctttcagggaattcaggtcccacgtgaaggttgtaattattttgttccagaaggaaacagaggcctgtaattctgagcctgctgcaggggctcaggccccgccctacctcctggctcccagcagccgggcagccggtccttgccgcttcctcccagccagcagcttgggcattgaggccatgttggtggggcaggcgggcaggtgctggggtgtttggagttgcttctcagggggtcagatgcctgggacatgggggactttcccagtgtggggggacactgctggaggcccctgctcacccatgccttcaaagccaagcgttgtgcccacctctggtgagatgccctaatactatgcggacctgttgccagacctcctacttgcttcctgggtctcaccttcagctccaaatccttgcccctgaccccaccgggcttcaatgccctggacagggcatgtgccccatgtcagaggattgggagtggagggtgggacttcctgcactccatggggctcactctcttaccaggaccccttcaggggccgtgggagctcctgcccggcaggaggctgttctctcctggagacccgggggttggttgtgggcttggggttgttggcctaatccgttcccgatcaagttcacccaggttttcaccctggggctccgcctaccgttggtgatcactttaagatttgctctttcaggagggattacgaggtgctggccctggtcttcatttactcactggaattcttgcagaaaagcctctttccttaccagctttcagtggcactgcaccaagacttgcggccaccccccgcttgcagagaattctcatggaggccagggtagatgtgggggctggttccccagctccttccagcgtggccgaggagtccctcctgagcgtgtgtgtctcgtgaaagcgcacatgtttgctaacatatctagttgggttcgatccacacaagtgctattctttccatgctcagacggtgccatcttgggtcagctggcggaggccagcgccagtgtcctgtggtgaccacagcagcctgctggcatctttgcccccgccgtgccacgtcatctgggctcactgtgcgttttctggctcaggcctgaggcagccacgtccctgggagctctgcttcctgctttctgcccctcgggccgctgctgtttctaaacctttgcagtcaacacagctaggattcacttttgtgtctgatgccggaaatcttgacgtttaatgttaacatgatcaattttatagatgtaaaggttaatatatctatatcaacatgtaatataggtgtgtaaaatatttaaaatataacaacataatgtcacatattactgaaaataatatatgtaatactattctgatgcagtatgatagtttcggaagaaaaggaccctagcacctcccaccaaggagggtgcccgcgggcgtcccggtgggtggtggcagtgaacgcctgagctcgccctgcccgtctttttgtcctggggtctggccctttggggtatgtgtcacatccctctctctgtggcaaagtcatgacctcagaacacacttaagcatcttcattcactttctatttttggagactcctcgtttttttaaaacccactgtgttaggattctgtggcacctccgcagccctgggtccactcccgtcctggtctccccggccttcctgtggccgcatctgggcagggccccatcgtccttccgggcttccagcctaagcaggccccacgccggcttctcctccccgcccctcgcctccttgtgatgtgcagagctgtgggacacacccaactccctggggggactctggctgtcccagtcttttctccaacaagctgtggggagggtgtgagccaccagctttctcaccatggagaaggtgtggcccaggcagggaggtgctggtgccttggggcctcagagacagtggggtgggagagaggtaggtgagcacgagactccgaccccgtgtcccggtgggggctctgagggctcccaggcaggtggggccccaaggcctccaggttcctgagaacacctcatgtcctggaggcctcagtgacgcagagcagctgagctcagctccatgagcgagggtcatctagaaaggtaggagagacgtgaggagcggccagtgctgctccagccttggagtctgtgtctctgctgccgggagagggaaggctcctgcgaaggccactgctgctgttcgggacgaagggcccgtccaggctgtctcctcccaaggcccgttacacatgtttctaatgaggatagtggctgatggatgtttaccgacatttccaaaggtcatgctgttgttgatggagaaggacttggatggttttaatgacctcctggggctgtgtgtttctttgcagggaagtgtggttgcctttgatttgagcctctttcgaatcctaaaatgctgcattagaagggatggacgaagcaggttccaggcatggcagggaccccacttgtgccacagcaccagctgtggcctctgcggatcccccaaacagccctcctcctgacccatcttgcacgcagtccctggtgactccctagaagtttgggagggaccccaggggctggaggatgcataggtggagctgctgcgattccggggtcggcctctacctcgctgtcagccgtggagtgggtggctcagtttgccttgttacagctgcctcttccttctgagaaatggaagatggtatttgtaggaatgcgtttgtgtgaccggctctaatcctcgcaaacattcctcacagggactgttcagcttcccgcacagaatctgcggggtcggaggaagtcattccaggactgagaaagtgaagcctcgtggtgtggaggcactgacgcatggctctgtctaggagtcactgttggtacccccggcaggtctcaactggcgttgggctggggactgtgtcagcggggcctccgagagcctcctgctccccctgggacgtgaatgggagatggtccaaaatgcagcttctctttaatttgtgtttgtgtcaatcttactatgtacaatttttacaagtccagtggtcacatgcaatatgtaatgacaagaattcaccttcgtatttctagacgatgtactgctgctgctgcttgatccttaagttttcaatttagacgttagttaagggctttttctatggaagatgaagaggctgagatctctcctgttcactgccacacatccacatccactctcacacacacacccactcacactcacacacatccactcacacacacacccgctcacacattcacatccactctcacacacatatccactcacactcacacacatccacacacacccccccacacacatatccactcacacacatccactcactgtcacacacgtcactcacactcatttactcacacacatccactcacactcatttacacacgcacacatgcactctcacactcacatccactcacacacgcactctcacattcactcaaacacacccactcacacacatccactcacatccagacatccactgtcacacacacgcactctcacacacattcacacaaacacacatacacacacatccactcacacacacccactcacatttactcacacacatccaatcacacatccactcacacacccactcacacacacatgcactcacacactcacacacacatatccacacacacatgcactctcacacacatccactcacacacacatccactcacacacatccacacacacacaatgtttggctaactcaagacttggtgtttatgttaatgattttagcccatccatgtagaggattatagatgttgccggccctttcttctctgtagcattgatcccggcttggtgcttggtcttcaaattgtttacagtgttgtcactcaggaatgcccagcgtgaggagaaagaatcccctcttacattcatgctcacacacacatccaccctcacactctcacacggcacacgcctgcaggtgccctccaggcctccccgcgtgccgctgggcttcctcacggcatggtggtctcagggcggttgcagtttctcccatggcagcccagggcttccacgagggcagcactggaagtggcagtggcctctccgcggggccgggacaggggcaggtccctccagtgacttctcggcggggctgcgacaggggcaggtccctcctgccctgctgtggtcaggcagggcccatggggcgcctttgtcctgacaggaggagtggcggggctggcgtggccccgtgcaccctcggctctgcaggctccgctgccttccccgtccctgtgctctccacccaccggctggtggagaactggggctgacagtgtctgtctctctgtttgttggatttagggggctgctctcttcagggcccagggttggccctgggttgcggggctgacgggatcgtctgtccccgccaggtctttttgcctgaggtggccatccggggcctgcgtgggctcaggtggggggcgatggaagcagggctgacacctggggctccgcacagatctgggaaagggttttcccctcagggtctagccctcccttcccaccctgggatccccatgcgtggggctgtgtcctggtggagggggcttggggctcctccccaggctcgggtctccacggggccgtcagtgcgaggcgagggtccccggagtcatgtatgggggtccttccacaccatgagcccggcacaggcatggtcgtcagcccccaccaagaggccacaaggctccaggcccgctggcttctccgtggccctgcgtgtagggcctgtggactgcgggacttcagggctgtggtctgagcccccaagcatggaagaccctgcactctctcccagcacagccgggctgtgggccctgagggaaggagggccggcaggagctggggggcggtggaggtcccgggtgagcctcaggccctccggggcaccctgacctgctgctcagaccttgaggggctggtcccccatactcgaccctgagttaaatctctgcccctttttgctttcccccaaggtcaccgacgatgagggcgcacctgctgtcctggagcttccgatctctgttcggggaccctgtgagccttctggccggctgcgtgcagagcccactgggcacggtggtcggcctggtgtgaggccccccggggaccggcagtgtgtccagggaggggatggccctgagcccagcggctcctcccgctgagtgtatttcttcccaccactcagcgcatggctgccctggctcacgaggcagtcgggactcgtgacttgctggctgctggctgctgctgcctcgcgcgctggggttccatggaggaactgggcctgccgccccggcctcacctgctgcccgcatgctggggtcccatggaggaaccaggcctggcgccccggcctcgcccagcggctggtgtgggcagctgttccctgcctcgcagtgtcctggaggcagctgtctcgcagactcagcttggtctcccgcaggcttcagaaaaacccaattgcacgtgtgggattcttccccagcccttgggtgcggggtctctgtgcacttgagagctgggggacccacccaccgtctcccactccaagttcatcccagagcgtggggcccgctgggcacctggcacctggcctgcagatgctgctacgagtgaccagtgctgtgtggaggaggccaagggcggcccctgggaaaccgggcttcaacagtacaaggaaaagaaacttgctctgttttgtaagagcgtgttccttttcctcttttttgtcactttaaagaccaaaaagaataaagaaagaaaagaaaaaaattaatctgctctttctttgtttaaatgttaaaaacaaaaagagagagaaacatatgtcatagttgaagttgtgacttgtgcggccacagttcacactcatgcgtgtgtccctgtcggggctgacggggcctgagtcccctgggcactgctgggcggggcccatgtcgtacgggttggggtgacgccgccaccggctgcatctcgctgcctccaggtggggggacgctggtcaccgccctgagccccaggagggctgtgggctgagtccccatctccaggcctccctgctggctttccagtggacgctgggatttcctggagaggcagtgctctgcacgcggggagctttgttctttgtttcctggagtgactcctctcatcccttgtttcttgatttgctcattcagaaccaagggagatctcagagatgacgatggtggctttgcttgttcctggttttgctagaacattctgtgctctaaaggcatcgctgccctcagcaaggatcgtctggcgggggaggggtcgggggagggcagcagcatacacctggagggtcctctccagggcacatgagggaacaaccctcatggtttcctatggttctggacctgacttgcgaggaggggcatggttttcaaactggtttgtagcagcagagcccttttctccaacaaaatcacccagaatcacttcctcccggaggggctgggctcatcctcctgaagccctccaggcccaagagtcctgggaagcctttgaaaatccagggaggggctcgcatgagcccaggagagcagagccaggacttgagaggaatgagagcagctccccttcccctcctccctccccggccctgcccacgtgggtgcagcagagtcagggccctggcccttggggctgggcatctcatccctctgagctccggtgcccaggggctgcccctgcctgatctgctgctcggggtgactccccctgccgcacaccccactttgcacccaggacctcctactgactagggttggctcccctttacgaaggaaggccttcgtaaagcttggcactgcttcaagaaatgtgtgtgtccaatggaaggagcaggcctcacccctgggacaaaatatgcgtgcagccctgggcacattcactcccagctgcccagcctgcaactagagctcagccactgcaggtgacagcaacgggacccgcctttgagcctgaggccaggactgacgccacagcctgcagctcctccccaagcccagccccagcccttgcccttcaatcctgagaccctgagatgcatgggtggggctttcatccggtgaggagcggaggcccagggaggtgggttccccagctgccagtacccactggtcaggctgggctggaccaggtcctgaatccccgcccttccacccatgggctccccaggaaggctaaactgagggaagaattcctgctgggaaagccctgttctgggaccagggtttcg

SEQ ID NO: 494 - DNA, 99813 bp, Homo sapiens
  source 1..99813: mol_type = genomic DNA
taaaagcagagggagcctgctgtctctgcctcgcccacactaacacccctatttagaaaggttgacacatcactatcactgcttctgaaaattttatccggccgaaggcatcagcccaaatttgaattcttgccaaagctgctggtgatttcgttctttgaatgcagtatcttcctcatgaacacgtacagctcttacaagaaaatgagaatacggtttggggaggaggatccctcacattccttttcctaatgccagcctcgcgaagtctggtcccatgtaccctgggattctgccacggaagatgactcacttaattaacacgctgctcctgaccgtacacttggaagcagaggttccgttcctttggttcttgccaaagctgcttacgaaaccatatcttgtgttggtgcccatggtgtgtaaaaatacaagttcatcatttccctgatacaaattatgacaggctaaatttagtgcctcacctgtcctaactagctttcccaccatcatgcctgccgccgggctgtggtcctttctgaggtcccgtgtccctctgaggacagggacacccagacacagaggtcagttgtcagacgcggccacggtgctcgggaggctggctgcagacgggcgattcaccctgggtgtcttcttgagtcttattttttgtagagacgaggtctcgctttggtgctcaggctggtctcaatctcctgggcgcaagcgatcctcccgcttgggcgtgggccagcgcgcccgtcccaacgctgggagtcccggagatcttggtcacaggcttaagggaaaggcctagcgcgtggccgcgcgtgcctctggtttcaagggacatggactgcgtgtctggggcccctccgcactccgtgtcagaccctgcgtcccccgggtccgcgcgggacccgggcagggcgtcgccctctgcggcgtctgcgccccgcgaaccctggggcacctgcaacccctgggccgcggagccaggcgtgcgccgcctcctggtctcatcaacgtgagaacgctttacccccgaagagctcagctcctagggggctatgtccctttgcgtctctcgctcgccaggcggtgccgtttactcgaccgcaccatgcgtgggtagcggtcgcgcccgctggtagctgtgcggcgggaacacgttctaagtaaggcctgactccgcgcgcctcttgccagggacgtcacgtcacgcctccactcgcagcctcggagcacccccgcgtcccgcgcccgaagctcgggacccccgctctggcgaaacgaggaatatgacatacagcaaaacaccccttcgcggccgctgcactgccgcgacacacccggcgcctgcctctacagcaagccggcgaggggctgggaccccgccgggacgtgctgacgtcaggcccgacggggggcggggcctgggcggcggcggcgttagttctccgggtacctcaggcgcctcagcctccttagtctcctcatcctgcttcacaggctccgcggcctccggcctcctcggcccccgtcccccggcctcctcggcccccgtcccccgccatccgccgcccggatcctcgccgccctccctaggccgccccgccgccatgggcctgcgcccgccgcgccgccgggccgagggcagctgaggcgcggtgcgaagatgggcgaggacagagcagggcccgagcgccagccccagcagcccgggcgccccgcgcgcgcccgcccgcgccgccgaggggatgcccgcgcccgccgccgcgccctgagcgcctttgtctgccgcccgcgcccttccgcaccactagcctctcgggagcatggcgtcggccccgccggcctcgcccccgggctcggagccgccggggcccgacccggagccgggcgggccggacgggccgggggcggcacaactggctccgggccctgcggagctacgcctcggagcgcccgtcggcggccccgacccgcagtccccgggcctggatgagcctgcgcccggggccgctgcagatggcggggcgcgttggagcgccgggccggccccggggctggagggaggcccgcgagaccccgggccgtccgccccgccgccgcgctccggcccgcgggggcagcttgcgagccccgacgccccgggcccagggccgcgctccgaagcgccgcttccagaactcgacccgttgttctcctggactgaggagcccgaggagtgtggccccgcgagctgcccggagagcgcgcctttccgcttgcaggggtccagcagcagccaccgagcgcggggcgaggtcgacgtcttctctcccttccccgcgcccacggcgggcgagctggcgctggagcaaggtcccgggtccccgccgcagccctcggacctcagccagacccacccccttccgagcgagcccgtggggagtcaggaggacggcccccgcctccgagccgtgttcgatgccctggacggggatggggacggtttcgtccgcatcgaggacttcatccagtttgctacggtctacggggcagagcaggtacggagcggcccgggccggggcgtgggaactgggcaggtgcgcgctggccggcggggttgatgtgggaccggtcgacgctgcccctggagtcgggaaaggcactgtcaagacctgacggtcctgctttttctgcttattcaccacttcggccctggatttctggttgaattgcgctggagtccctcttcccttcttaaaaggaggttctattctggggagtcagtttcttcccctccccccagcgcctcgtcagctggatcttaccgaggtcagctcctcgcctggggacacccccccagggggcctgatcgccacccccccagggtgcctgatcgacgtgcccctgaatgaagaagttccccgcgattcccccacccgagggcccagatactgctcggctgaattcacccaagttctagccgcagaggccaggctgcccagacgccttgagatcctactgatagacacctattttgagtacaattactttactgtgtgtggttgacatcttttctacttagatttcatcttttatttgggagacagtcaatgcttgtagagagtcctggaattaagaatttttactttggtgcctttggggaggaaggcaatgagcctcggagcttgttggcaaatgcagaagtctagcagaactccgttagggccacgtccactctcgtaggagaggtgaaatgcgtggacaggcactacgcacagtacagtgtggaaggggtccacgcggtcctcagggcacctgctcctgggggaaaggtgggccccaagatgcagttgttcctgtctacctcagcacttaataaagtttaagtggagataacagcagggccgtgtgtgttctgccaataacccggtggacatcaaataataccagtgctcacttttaaatattttacttagcaggaaatccctaaggtgcatctgtcaattttttgtattttgacttctcacacatgcagacatctggtaagtgggtgttcaagtacatatgcatgtttaagccaagaggtctgtaagaaaagaggtaaaattggcacactgctatttagggtgtcagtcataacattaagaaccttgatggtcgggcgcggtggctcatgcctgtaatcccagcactttaggaggccgaggcgggcggatcacgaggtcaggagattgagaccatcctggctaatatggtgaaaccccgtctccactaaaaaatacaaaaaaattagtcgggcgtggtggcgggcacctgtactcctagctactcgggaggctgaggcaggagaatggcgtgaacccgggaggcggagcttgcagtgagcggagatcgcgccactgcactccagcctgggcgacagagcgagacttcgtctcaaaaaaaaaaaacagcaacaaaacaaaaaacacagggtcctgataaatcagggttccttgctgagttcacattaagaagatgtgcagacaggtgcgtgcggggcagcctgcaatgctcgcaagcttagctccggttgggatattgtcagggtagttttccacctacactaatgggcagtgaaatatgtgactgatactttcctgtatggtcagcgtggatggtggttgctggtccaggtgttttgctgcgtttccttcttgcccctgggctggagagcaccttgagctcccttggttgctgttggctactgcgctgtctcttctcccaaacatactcttgcttcagtacagcaaagaagttaggagagtaccacatttgctccttgttaccataacccaactcttgatagagaacttctgtgaggctcaggatgtttccactggatcataccacagttctctgagatagtaggtaagcaggattcatccccactttacaggtaagaaactggaaacccagaaaggtcagatagctctcccaaggtctcacaggagtagaactaggtcttttggcccttagaccttagatgcctcttcttagatgtggtggctcacaatatccctattgtgataatatcttactgactttcatacaattctttttatttgagaaacatcttttgtcataacctcccttaatgatcacaatgggaaaaactttgtgttgctatttggggctgagctttcttgtcatcacaaagtagaaatgagacaaaattcttcactctgaattccaagagctcttgatgaaattcgaaggttgggggcaagggctggatgacttgggatttggtgaggatggggaagtggaagggatctcctgtggtattactccttgtctgttcttctagacggcttaggaagaagcaatgttgggtgtgatctgagtgcctggacttgggccggcttcctgggatggaggagagctcttgatttcttaaagctaagttactgtttggcaacagataatttacagggtaaagaaaggttgattttcatgttatgtaaccctgtagccattgctcagttttagcagtcttggttcatctgtaaactcaccactcactacccccagatgatttttgaagtgggttcctgacattatatcatttcttccataaatgcttcagtatatatttccaaaagataccgattcttttaaagacattaatgatttttttaaaaacgctagggaacagttcagattaactggataacagcaataaaggtcataagtttttgtactttctaccttgagatttcaaaatattgagcacatgagagactcttagtccagtcacattactgtccttgatgataacaactagattatcttaatttttttttttttttgagatggagtctcgcctgctctgtcgcccaggctggagtgcaatggtgtgatctcggctcactgcaacctctgcctcccgggttcaagcgattctcctgcttcagcctcccgagtagctgggattaccggtgcccgtcaccacacctggctattttttgtatttttagtagagacggttttgccatgttggccaggctggtcttgaactcttgacctcaggtgatccacccgcctcggcctcccaaagtgctgggattacaggcatgagccactgtgcccggccaagtatcttaatttttatcaaattttcagaggtagcatattgagtatcttctatgtaatctgtttatgaaggtagcattttaaattatttaaatggattatctgaatttttaatagaagcagctcctgtttataatacagatggcttttgtgtccctgtttctttagcaatgtcatggtgtgtttggatctaattacgtcatctggtgatagatcaggtgtagtgtaatataacacagtgttgtgttagcagaaatcagcacatgaaaggagcaagtggagctttctggttatatttttttgaaacaggaatttatagtcagatgtgtccaggaattaggtatgaagttggaataggtgatttttaaggcttcaaccatctctggagattgacatgaccccttcatactgagaggactgatgcttttgtatttactgccacctatcatgaagcagagattgtaaaataaattctaagagtgttgtgagaaaggattactttaattttgttttgtttttaaagattataactgtaatttacatgttatttttacagtcacttaagcagttgcgttttaatagccactgattcttttcagagaatgtccttcagtaaccttggtaggcattgtctgtcttcagtacttgcagaaataggctgccgaaggaagtgtcgatgctcagatctccctacgtttttttattcctgcaccgctaatggtggcagtaggaagttcctagggacatttgactgcacctttttgttcgtttgttttgagacaggatctcactctgtcacccagtctgaagtgcagtggcaagatctcagctcactgcaacctccacctcctgggctcaagcagtcctctcatcttagcctcctgagtagctgggactataggcaggcatgaccatgctccgctaatttaaaaaaattggctgggtgcagtggctcacgcctgtaatcccagcattttgggaggctgaggcgggcagatcatgaggtcaggagacggtgaaaccccgtctctactaaaaatacaaacatttttaaaaattatttttgtagagatgaagtatagtatagtgatactgcccaggcatattattgaactcccaggctcaagcgaccgtcctcgggcctcagcctctcaaagttctgggattgcaggcatgagccgtagcgcccagcctggcatcgccttttatttgccctgtatcatttccagtctcttagccttgaatttgagtgaaagtgtgtgtgaatgagagtgagcatgtgtgtgtgtgagcagttacatatgtgagctggtgtgtgtgtgtgtaatatgtgtgtgcggtgagatgtgtgggagcatgtgtctgcaggatcagggatgtgtgtatgtgggagtgggatatttgtgtgtaagtggcatattatgtatgtgtgtgagcaggtgagtgtatgtattctgggtctacatgctgactgaattgctgaaaggcaaatgaagcttgggttgtataaaacagaaaatgaccaataatcccactatcctgagaaaaataacattcccattattttactacatttcttttcagactttttttttttttttgaaatagagtcttgctctcttgcccatgctggagtgcagtggcacaatctcagttcactgcaacctccaccacgtgggttcaagcgattgtcttgcctgagtctcctgagtagcttggactacaggcgtgcaacgcctggctaatttttatatttttagtagagacggggtttcgccgtgttgactaggctggtctcgaacaccagacctcaagtgatccacctgcctcagcctcccaaagtgttgggattacagatgtgagccaccgcacctggcccagaccttttttaacacagacatagacacacaggtgactgtctataaaagtacacaattgagatcatattggggtagaagctaaatttttttttttttttgagatggagtctcgctctgtcacccaggctggagtgcagtggcgtgatcttggctcgctgcaagctccgcctcccgggtttatgccattctcctgcctcagcctcctgagtagctgggactacaggcgcccgccacccctcccggctaatttttttgtatttttattagagatgaggtttcaccgtgttagccagtatggtcttgatctcctgaccgcatgatccgcccacctcggcctcccaaagtgctgggatgataggcatgagctatggcgcccagtgaagctaaattatttttatagatgttcattgttttaaaagaaactggcctggcgcggtaactcacacctgtcatcccaacactttgggaggccaaggcgggtggatcatctgagatcaggagaccagcctggccaacatggtgaaaccccatctctactaaaaatacaaaaattagctgggtgtggtggtaggcgcctataatcccaggtacttcagaggtcgaggcaggagaatcgcttgaacctgggaggcagaggttgcagtgagctgagatcttgccattgcactccagcctggacgacaagggtgaaactgtctcgaaaaactaaaaagaaactaaaactagtaggtaaaatactagtagataaaataagaaaaataaggagcccttgtaatccccccatccattaatatcattaagagataattaaatatttaatatgtaaattaaaatgtatgtaatacatacttgattatagataaatgttataatttgcatgcatgttgctttgaatctgctttttgacctggttttttttttttttttgtgtgtgtgtgtgtgtgacagggtctcgctctgtggcccaggctggagttcagtggtacgatctcggctcagtgcagtctctgcctcccgggttcaagcaattctcctgcctcagactccctcagccacttagctgggattacaggcgcctgccaccactccggctaaatttttgtatttttaatagagatggggttttgtcacgttggccaggctggtctcaaactcttgacctcgtgatccacccgccttggcctcccaaagtgctgggattacaggcatgagccattgcccctagcctgagctgtttctttttaattgatagaaatatttgtacatattcatgggatgggtacatgtggtattttgttacaggcatacactgtaatgatcaagttggggtgtctgtcacctccatatttatctttttttttttttttttttttttgagacatagtctctgtctcttgcccaggctggagtgcagtggcgcgatctcagctcgctgcaagctctgcctcccgggttgatgccattctcctgcctcagcctcctgatagctgggattacaggtacatgccagcatgcccagctaatttttgtatttttactagagacagggtttcaccatgttggccaggctggtctcgaactcctgacctggtgatccgcccacctgggcctcccaaagtactgggattacaggcgtgagccaccgctcattgcatatttctaaccattaaccgtgctctttaccctcctgatgcttcccagcctctgatatcaatcgctctattctctacctccattagatccacttttctagctcccacataagagtaaaaacgtgatatttgtctttctctgcctgtcttacttgacttcacataatgacctccatttccttccacgttgctgcaaatgacatgatttcatttttttacgtggccaaatagtactccaggccggatgcggtggctcacgcctgtaatctcagcactttggaaggccaaggcgggcggatcacgaggtcaggagatcgagaccatcctagctaacacggtgaaaccctgtctctactaaaaatacaaaaaaaaaaaaaattagctgggtgtggttgcgggcgcctgtagacccacctacttgggaggctgaggcaggagaatggcgtgaacctgggaggtggagcttgcagtgagccgagatcgtgccactgcactccagtctgggtgacagagcgagactctgtctcaaaaaaaaaaaaaaaaagtactccattgtgtatctatattacattttctttatccattcaactgttgatggacacttagattgattccatatctttgctattgagaacagtgctgcagtaaacatggggtgcaggcatccctgtggtatatggatttcctttcctttggataaatctcagtagtgggattgctggattgtatagtagttgacctaaattttttgaaattgaaggtctctgatatcagatgtatatttatttatttaaaaatttctttattttttgagacagagttcactattgttggctaggctggagtgcaatggcacgattttaggtcactgcaaccttcgcctcctgggttcaagcaattctcctgcctcagcctccttagtagctgggattacaagcatgtgccaccatgctcggctaattttttgtatttttagtagaggcggggtttcgccatgttagcccaggctggtctcgcgctcctgacctcaagtgatctgcgtgccgcagcctcccaaagtgctgggattacaagcgtgagccactgcaccctgccagatgtatactttatttttttgatatagagtctcactctgttgcccaggctggagtgcagtggtgcaatcactggtcactgcagccttgacctcccaggctcaggtggtcctcccatctcagcctcccaggtagctgggactacaggtacgtgttaccacacctgcctaatttttctattttttatagagacagggttttgccatgttgatctccaactcctgggctcaagtgatcttcccaccttggcctcccaaagtgctaggattacaagcatgagccactggcctggcagatgtatactttaatggaaacctaaggtttacttgtccccaggaagattcagaattgttaaggatggccggacgcagtggctcacacctgtaatcccagcactttgggaagccgaggtgggcagatcacttgatgtcaggagtttaagaccagctggccaacatggtaaaatctaaagtctactgtctactaaaaatacaagaattagaccaggcgcggtggctcacgcctgtaatcccagcactttgggaggccaaggcaggtggatcacgaggtcaagagatcgagactagcctaaccaacatggtgaaaccccgtctctacgaaaaatacaaaaaattagccgggcgtagtggcgggtgcctatagtcccagctactcgggaggctgaggcaggagaattgcttgaagctcagaggtggaggttgcagtgagtcgagatcttgccactgcactccagcctgggcgacagagcgagactccgtctcaaaaaaaaaaaaaaaaagttaaggactattctggttccagtttaggatctaacatacaggaagagtttagttctgtgtagatggtgcagacaaggttgttaagggcaccaggcttatggattgcttctcttccaagcacttattttgtttaaattctggaaacattcaatgtaaacattagttatatcagacaaaaggattaggcatccacttaagtctattatgtagctcataaaagtggtaattataaaggctccaaatttacttagattagcacttctaagttattatgatagagtgatgtactaaatatacatcacacttacaaccaggtagaattgaaagaagttttgaagaaatattaaaagtgcttttagttttgtgttgggagatatgagtgtgtaggagagggcgtatggtgggaagggttttatttgaggtattggctatatttcctgttgtgttactgattttgattattttgaaaagtagtgcctttgcacatagcatagagttcaaacagtacagaagggaatctagtaaaaaaaatcattacagttggtagaaataaaaaaatttaagtaaaccctaaagataaaatatttacatactttgacttcattaaggttcatataaaatatacaaaatacatctaaagaaacttggattttctagtaaattaaagaactagatagaacattgaatttgcatctgcagatgctttatgaagatgggctatttttactgatatttggagaaatgcatattagaaaatgcctgtaattcctgcttcttggagaaggaaaaaaagagatgggatcattggccaggcacggtgactcacacctgtaatcccagcactttgggaggccgacgccggcgactcacaaggtcaggagttcgagaccagcctggctaacatggtgaaaccctgtccctgctaaaagtacaaaaaattagccgggcgtggtggcaggcgcctgtaattccagctactcgggggttgaggcaggagaattgcttgaatccgagaggcggaggttacagtgagccaagatcgcgccaccgcactccagcccaggcgaaagtgcaagactgtgtctcaaagaagaagaaaagagatgggatctcaatttgttgtctaggctggagtgcagtggtgtgatcatggttcactgcagccttgaagtcctggggtgggttcaagggattctcccacctcagcctccaggggcatgcccccacacccagccaatgtttcatttatttatttatttatttgtttatttatttttgagacagggtttggccctgttgcccagggtggagtgcagtggcatgatctgagctcactgcaagctccacctcccaggttcaagagattctcctgcctcagcctcctgagtagctgggactataaatgcctgccagcacacccagctaacttttgtgttttttgtagaggcgaggttttgccatgttgttagcctgctaagctcaaaggatctgcccacctcggcgtccgaaagtgctgggattacagatatgagctaccgcgcccagccttatttttatttttcgtagagacgagttctcactgttacccggatgaacccctggcctcaagcagtcctcctagtgttgagattatgggcgtaaccatcttgctaggccaacaaattcttagtgacagaattatagctagataggaagaataagtcctagtgttctatatcactgtaggatgactgtagttaataatctgtttttcctaatagctagaaggaggagtcgggtgcagtggctcacacttgtaatcccagcactttgagaggctggggagggtgaatcacctgaggtcaggagttggagaccagcctggacaacatgatacaaaaccctgtccctactaaaaatacaaaaattagctgggtgtggtggcgggcacctatagtcccagctactggggaggctaaggcaggagaatcgtttgaacctgggaggcgggggttgcagtgaggcaagatcgcgccactgcactccagcctgggcgacagagggagactctgtctcagaaaaaaaggctagatgtggtggctcatgcctgtaatcctagcactttgggaggccgaggcgggcggatcacctgaggtcaggatttctagaccagtgtggccaacatggtgaaaccccatctctaataaaaatacaaaaaattagccaggtgtggtggtgcgtgcctgtagtcccagctactcaggaggctgaggcaggagaatcacttgaacctgggaggcggaggttgcagtgagctgagatagtgccattgcgctccagcctggacaacaagggtgaaactccatctcaaaaaaaaaaaaaaaaaaaaaagtcagatggatattgaatctcccaacccaaagaagtgataaatgttgaagatgagagacgtgccaagtacactgaactgataactatatgttatagacatcagaacatcactgtgcagccacgagcgcgcaagactgttatgtcatttaatcaaataaagtgaaaaattcttaatgaaaagaattgtactaattgcattgtaattattattattttttgagacagtgtctcgctctgttgcccaggctggagtgcaatggcacgatcttggctcattcttggcccatacccactgcaacctctgcctcctgggttcaagtgattctcctgccttagtctcccgagtagctgggattaaaggctcgtgccagcacacctgcttaatttttatatttttagtagagatggggtttcacatattggccaggctggccttgaactcctgaccttaagtgatccacccaccttggcctcccaaagtgctgggattacaggcatcagccactgcgcctggccttcccccacctcctcctgagatggagtcttcctctgtcacccaggctggagtgtagtggtgtgatatccacttactgcaacctccgcctctcaggttcaagcaattctcctgccttagcctcctgagtagctgggattacaggcacgtaccaccatgcccggctactttttgtattcttagtagagatggggtttcactatgttggccaggctggtcttgaactgttgacctagtgatctgcccacctcggcctcccagagggctgggattacaggcatgagccgctgcgtccggctttttttttttttttttttgagacagagtcttgttctgtcacccaggctggagtgcagtggcactatctcagctcactgcaacctccgcttccagggttcaagtaattctcctgcctcagcctcacgagtagctgggactacaggtgcacgccaccacgcctggctaatttttgtatgttcatattggccaggctggtctggaactcctgaccttgggatctgtctgccttgggctcccaaactgctgggattacaggcatgagccaatgtgtctggccttttaaatttttttttttttttcctgagatggaatttcgctctaacaccaggctggagtgcggtggcgcgatctcagctcactgcaacctccgcctcccaggttcaagtgattctcctgtcttagcctcccaagtagctgggactactggcacgcgccaccacgcccagctaatttttgtatttttagcagagacggggtttcactatattggccaggatggtctccatgtcttgaccttgtgatccgcccgccttggcacccaaagtgctgggattataggcgtgaaccgccgcgcccggctaaaacattctttaaagagatagggccttgctctgtcacccaggtaggagtgcactggtgccatcacaactcactgcagccttgaactcctgggctcaagtgatcctcccgccttagcctcctcttcgtagctggcactacaggtgtgcaccactgtacttggctttcaaaagttcttgagactaacaggctaggaaaaatggattcagtgtcatgattagggaggaaaataaattctttaagtaggtacagttctatttttgtgtccagatatttcatgcttgtatctgtccgtctgtctttctgtctgttcatggctagtcaagtgaagcagtgggaatggagaaggaccaaagcaacccgtaacgattgtgatcagttagttgtaaacaccactgcactaggaccagctcatcttgttttagcaaattggtattactctggttaccatcttgtgatattcttgtgtttatcataagtttcaaaacagggctcatgttgagccagtgtcctgtgtgtgccactaaaaccggcgtcctagctcttcagcctttaggtctcctgatggctgtggacccacaaaatctgagacagatctcagttagtttagaatgtttattttgccatggttgaggatgcacacccgtgacacagcctcaggtactcctgatgacatgtgcccaaggtgactggggcacagcttggttttatgcattttagggagacatgagacatcaatcaatatatgaaagaagtacattggttcattctggaaaggtgggacaactccaagcaaaggcaggaagacatgaagcagggaggggcttccaggtcacagataggtgagagacaaacagttgcattcttttttttttttgagacggggtctcgctctgttgcccagctggagtgtggtggtgcaatcgcggatcagtgcaccctctgcctcctggtttcaagcaattctcctgcctcagcctcctgagtagctgggactacaggtgcctgcctcgtctggctaattttttgtatttttagtagacacggggtttcactgtgttagccaggatggtctcgatctcctgacctcatgatccgccccccccatcggcctcccaaagtgctgggattacaggcgtgagccaccgcgcccggccttcttggttgattaatatttatttctttacttttattttcttttgagacagggtctcattctgtgccttatagttgcataaaatggaaatgtttctggacatttctggacaataaatttctgtgttcctttttctttttattaaagatttactaatttttgtatttttagtagagatggggtttcgccatgtttcccaggttgttctccaactcctgagctcaagtgatccgcccaccttggccttccaaagtgctgggattacaggcatgagccacctcgctcagcccctctgctgtcgtcccttccctgggatcagtggcccaaagtccaagggaggctcttgctctgcctaccttcccccttttctcctacctggtgggcattctcagctaggcctggccagctggcatcttaatttcctgaagggattttctctttgctgaaagatccccttgctttgctggccgtgtcctgcctactgtttcttaggtcagtgatgcatcttcctcacaaagatgttcaaaatacacagatgcttttatcccttatgggaaggaagacttctgaaaatgctgtgtgatgaatctgggaatgttagttctggagaccagccatgctgggggatcaggaaggcatccctgccatccctgctggttcagctgcagctgtgcctgcgggcaggaagtgaagaggtgagaacaggtgctggcacaggcccgcctggctgccctcttcccaccctcttgctccttcagccctcctccagaacacaggaaggtcagctgagtccatttttcttttttttttttttattgagacggagtctcgctttgtcgcccagggtggagtgcattggtgcaatctcggctcactgcaacctccagctcccaggttcaagcgattctcccgcgtctgcctcccgagtagctgggatgacaggtacctgccaccacgcctggctaatttttttgtatttttattagagacgggtttcaccatgttggtcaggctggtcttgaacttcttacctcaggtgatccacctgcctcagcctcgcagagtgctgggattataggccaccgtcgccatcgcgcctggccctatttttcttcaagcctgttcctgatcactcagtaacctggtattcccactcactcagtagcctgatgttcctgatccctaagtcgtgcgtatccacgattaaacaaacccatgctctaggagtacacagcaggggacatgaggtcttcccatcactgtcgacctctggcatgttctcacggggggtgagttttcccctctgtgtcaccctccagtaagtcctgccgattcattcaaagccccacctgtagaccagtgatgaaaattaattatttgaagtatcctgtaacagtcataaaataatcgctatgctgggtactctgtcgttgcctctctaaattgatctcacgcacgcggaccctaatgtgcacagggactagcctggagttggtgccagctgctcctctggctggagccctctgccccatgctgctcctttcttggtcatgcagcaaacacacatttgtgttcccacaccaggcacccttccttctgtgacataataacagcctttgagtgactgatacttttgatttgtctgcctagagaaggaattccacaactcttgaactatgaagttctctaatcatgcttttttgtttgtttgttttgagacggagtctcgctctctcgtccaggctggagtgcagtggcaccatgttggctcactgtaagcgccacctcccaggttcacgccattctcctgcctcagcctcccgagtagctgggactacaggcacccgccaccacgcctggctaattttttgtatttttagtagagacggggtttcaccgtgttagccagggtggtctcgtctcctgacctcgtgatccgcccacttcggcctcccaaagtgctgggattacaggcatgagccaccgcgcctggcctcatgctgtttttttaagaaacggggtctcactgtgttgcccaggccggagcgcagtggctgtttataggctctgtcacagtcactgcaccctccagctcctgggcagtcctcctgcctcagcttcctgcgtaggtgggactcctggcccatgccactgcacccagcttatgatgctggtttttgaaatggggttgctattcccatggtgagtgtcttgggggagtttgggcatggtagttggagttataaattcaactgaggtcttttgtttcattctggagcgttattagaaccctcgtgaagggggttgctatttcaggaggagctgcaatggccaaccaggagtgtgctggtctcctttctggtcttcctcccgctcagccgggctgccgcttctggtgtctggttgcttccatggttctctacttctgaagtggcaatccagggtggtcaggcaggggtgaattgtctttcggtgtcatgctactttttttctgacgtagtggcagtgtctgctgagtcgtcccaaagcacagagatgtgatttgcagaaggtatgttgtgtcttcgtgggcaggagctggagctccaccctgttgctttagcaggcggcctttgaccaattaagagagcaggtctttcttgttggcgtaactctcctgagggtcacaacaggctccgtgctagagcggtcatctctgcagatgtttcttcctctcttctaccactctcaccccttatttttttcccgcttgtttacaaagttttatttcattccaacatcgggtgggttggtttactttactaaaatccaagaaaaacaaggctgacgtttttgctgttggaaatgaaaagcccttttatgagaaagtccatccccgtcagcatggcttattctgtctggtgaggagagaagaagccatgaagacatttcctcttggtgatttaatttttaagaaccctcttcaggaagccagccctgtgatgcattttaagagaaataccagttagtgaggtttcatcagcactgaggaacacttggctctctcttgcagactaagaaataccaagcaggaggagtcttggcatttggaacgggtaaatcaagaacctgctcttgttggcttgcgagtgcctttaaagcgaaagcaagaagcttagaaggaaaacgtcacagatcatgcacgcttaaaataaaaacatgcaaaagaagtaaataaaaataataacttgcaaataaaggagaaaataaaaaccccatccagcaccgtgaatcttttcagccttctggcttttaaatttttctttgtataggacagttaaacaaaaccagagtcataattgaccattttaacctagtttaagtcaacatattgttaccacctctcgatatcagtacatctgcttctgcagcatgatctttggtggtggtggttgttgttgttgagagggagtctcgctctgtcgcccaggctggagtgcagtggcgcgatcttggctcactgcaacctctgcctcccaggttcaagcgattctcctgcctcagcctcccgaatagctgggactacaggcgcccgctaccacgcccggctaatttttgtacttttagtagagacggggtttcaccatgttagccaggatgatctagatctcctgaccttgtgatccgcccgccttggcctcccaaagtgctgggattacaggcatgagccatcgcgcccggcctggatatgtagggtttaaagcatttaagaaaatattttccgtcaccaaattgtcttccagaaaagtattgccaatctgatacaggaagaatggcatatcaacggagtttcagtttgtatttcctggagtgtatttgagctgatgttcctctgcatgttaataaacaagtgttttcgttcttgtgcgtgtctgtgttgtggtgtgggtgttctccaccctgaggcctctctttctcaacctgtgcatggaggttggccgaggcagcctctgaagtacatggagccctggacagcgccctgagtttctgtagggtttctttcttttgtggtattatcctttcttacgagtttcagatataggccatcagtctgcgtcattcagtaaggaataaagaacatggaaatgcctacttttcactacctttgttccggtgtgacgttctccttgtaaagggcagagggtagtagactaaggcaggcagcagcaggacggtgctgagaacggctctgaagagtctctcttttgtgctgacttaaaagttttctctactgttggatgatctcttgataattaaaaaagaaattatgatactgatagctgttcggcctgcagaataaagctgcagttacttcattcagcaaggtctcaggctcctaattttagagctcctagaattttgtagtcctctcaagattgggttctggccaggtgccatggctcacgcctataatcccagcactctgggaggctgaggcaggtgttttacttgaggtcaggagttcgaaaccagcctgggcaacacagcgagaccctgtctctattaaaaaagattgggttcaggccgggtgcagtggctcatgcatgtaatccaagcactttgggagacccaggcaggcagatcacttgaggtcaggagttcgagaccagcctggccaacatagcgagactatctctattaaaaaagactggagcctggtgcggtggctcacgcctgtaatcccagcacttcgggaggccaaggcaggtggaatacgaagtcaggggaccgagcccatgctggctaacatggtgaaaccctgtctctactaaaaatacaaaaaattagccaggcatcatggtgggtacctgtagtcccagctactcgggaggctgaggcaggagaatggcgtgaacccgggaggcagagcttgcagtgagccgagatctcaccactgcactccagcctgggtgacagagcgagactctgtctcaaaaaaaaaaaaaaaaaagaaaaaaagattgggttcaggctgggtgcggtggctcacacatgtaatccaagcactttaggaggccaaggcaggcagatcacttgaggtcaggagttggagaccagcctggccaacatggtgaaaccccgaatctactaaaaatacaaaaaaaaaaatcagccaggcctggtggcaagtgcctgtagtttcagctacttgggaggctgaggcacgagaatcgcttgaacccaggaggcggagtttacagtgagctgagatcttgccactgcattccagcctgggtgacagagcaagactcttgtctcaaaataaaaataaaaataaaaaaagattgggttttaggtactatgccaatatgggagctcttttaaatttaaagcaaatctcaaaataaaaaaatggacattctataatctcccccttgcccacccaagggagtgactctggtctggtatggggggatgagaatctgaggctgacaccctcaggcaggtggctgaatctcaggcccacagagactgggttgctgttggctcctgtagcggctccactgtggagagaaaggttctgccagaaaatctgggagccacagattagaaccttcctccaggcactcaccatttctccccatctgtgctctcggcgggaggtgctttgtgcccacttggcccaggtgcagggacccagcaagaatgggacagacctggctgctccctgggggaggcagatgggcaaaaggacgttatggcctgagcacctagcagcctccaggtacaggtgttctctggatgcagtcctgaggctcaggtgtaggcccctgtgtgaggtgggggtaggtggggctggaaagtgttctagacacagagacgagggtgcatcatagaatttggggacgttgggtcctacttgctcttggggaatgggagctttgcatcctgtcatctttgtttccctaaagatcaccctgggtgctgggcatgggggtgcgtgtctcaactactcgggaggctgaagtgggaagattactggagcccaagagtttgaagctgcagtgagccatgatcactcctgtgactaaccactgcactccagcctgggcagcatagtgaaaccccgtgtctttgaaataataaaataaagatcaccctggcctctttctgacccgtatctgaaattggttgtctatgtgaagcagaacagtggtacccagagaggcagggcactgaggcttgttttattttaggggacgacattgcaggtgggctttccttgggagcagatatttccttcagagggacataaagagtgctccttggcaggctgtcttccaggtggcctttggcactgcctgcagatcgggtgggcagtgcagctggggagctctgtgcactggcagggtcacctgcacgtggtctcatccttcacagtagaagtttgtggcatctgctgctctagcctggtgtccagatgtgtcctacagagacatgttgacctgttttccaagcacacttcagtgtgaggacttatttccatatagtcctttttattcatatatctcaaacttttttgttttttttttgagacgcactctcgctctgtcgcccaggctggagtgcagtggcgtgatctcagctcactgcaacctccgcctcctagtcctggttcacgcaattctcctgcctcagcctcccgagtagctgggattacaggcacatgcctccgtgcccagctaatttttgtatttttagtagattcggggtttcaccatgttggccaggctggtcttgaactcctgacctcatgatctgcctgcctcggcctcccaaagtgctgggattacaggcgtgagccaccatgcccggctttaaaaacatttttttaagagacgggctgggtgtgatggctcacagctatagtcccaacactttgagaggctgaggcaggaggatcacttgaggccaggagttcaagaccagcctgaacaatatagtgagactctgtttctacaaaaaatataaaaattagccaagtgtgatggtttacccctgtagttccagctacttgggaggctgaggcaggaggatcacttgaggccaggaatttgaggcttcagtgagctatgattgtgccagtgcactctagcctgggcagtagagtaagaccctgtctccaaaaaggaaaaaagagagtcagagagagagagatggcgtctcgctctgtcactcaggctggagttcagtggcacagtggcagcctcctgagtagctgggactacaggtgtgcaccactgcacctggctaattaaaaatatatatatattgtggccgggcgcagtggctcacacctgtaatcccagcactttgggaggccgaggcggtggatcacgatgtcaggagatcgagaccatcctggctaacacggtgaaacctcgtctctcctaatagtacaaaaaaattagccgggcgtggtggcaggcacctatagtcccagctactcagtgggctaaggcaggagaatggtgtgaacccggggggcagaggttgcagtgagccgagatcgcgccactgcgctccagcctgggcaacagagcgagactccatctccaaaaaagaaaagaagactaaaacgtataaattatacctgtctccctacagaaattcattaagagactcatgctcagactgttgtctggttaatgtgaacaacatgagcacatctgaagaaagggtgagaacaaagggttacattcagctttcaggtcaactaatttaaaacaacaggacgggccaggcacaatgaattgtgaaaaataacgctgacaatttaaaatagtggaacaaaattaaaaaaggaaaaagaaaaaaaactgtaaagaaaatttgacatatgaaaaagcgtattgtccaggcgcagtggctcacacctgtaatcctagcattttgggaggccgaggtgggcggatcatgtgaggtcaggagtttgagaccagcctggccaacatggtgaaaccaatctctactaaaaatacaaaaattagccgagcgtggtggcgcgcatctgtagtcccagctacttgggaggctgaggcaggagaatcacttgaaaccatgaggcagaggttgcagtgagtcgagattgcgccattgcactctagcctgggcaatgagggaaactgtctcaaaaaaatagccgggcgcagtggctcatgcctgtaatcctagcactttgggaggccgaggtgggcagatcacctgaggtcaggagtttgagaccagcctgatcaacatggagaaacgccgtctactaaaaatacaaaattaggccgggcgcggtggctcatgcctgtaatcccagcactttgggaggccgaggcaggtggatcacgaggtcaggagatcgagaccatcctggctaacacggtgaaaccccttctctaataaaaatacaaaatattagccgggcatggtggcgggcgcctgtagtcccagctactcgggaggctgaggcaggagaatggcgtgaacccaggaggcggagcttgcagtgagccgagatggtgccactgcactccagcctgggcagcagaacgagactccgtctcaagaaaaaaaaaaaaaaaaaaaatacaaaattagccgggcgtggtggtgcatgcctgtaatcccagctactcgggaggctgaagcaggagaatcacttgaacctgggaggtgggggttgcggtgagccaagatcgcaccactgcactccagcctgggcaacaagagtgaaactctgtctaaaaaaaaattgaataacataaataagtaaataaataagtaaataaaaacaggatggaaattatacctgaaatttaaaaagtaagatggctgtggtaggccaaataatggctcccaaagatagctaggtcctgctctgtccgctgagaccaccacactctacacagtagagtcctcctcatgctatgctctggccctcttgcccctccaacctcacttccagctgccggccccctgctcactctgctcctgacactccacaggcacacatcctcctccaggcctgtgcagtagctattccctctgcctggaatatgcagtcctgtatatctccagctcagtgtctcacagcgctgtcaccaggcgggacagagtgtcgggctcattcaggtgctcagcagaattcagctccttgaggttatagaactgaggaccctgtttgctggttggtcgtttgccagaaatggttcttaggtcctggagaaccctcaggttcaaccacatggtcctcccaggtatggcagcttacttcttctttgagaccaggaggctgctacgatggagtcttaagttaacataaatcacagctaggtgtggtggctcacacctgtagtcccagctactcaggaggctgaggtgggaggatcgcttgagcctaggatcttgaggctgcagtgagctgtgtttaccacaccactgcactccagcctgggtgacagggagaccctatctcaaaaaaaaaaaaaaaaagttttaggccgggtgcagtggctcacagctataatcccagcactttgggaggctgagttgggtggatcacttgaggtcaggagtttgagacccgcctggccaacatcgtgaaaccctgtctctactaaaaatacaaaattagccgtgcgtgatggcgggcatctgtaatcccagctgttgcgtagactgaggcaggagaattgtttgaacccgggaagcagaggttgcagtgagccaaggtcgtgccactgcactctagcctgggcgacagagtgaggctccatctcaaaaaaaaattttgttttaaagattaagttaacctcgtcacagtgactgtgccaccacatgcacaggccttgcccacactcaagagagggggtcttagaattctgcctgctaccatggtctagtcttggcacaccttccttgacaacatggaagccaggtcactacccaggccacctacaaggaagttcaccatttgacctgccgaacgtgcacaacaaactttttttctctttcttgagacagggtctcactctgtcgcccaggctggagtgcagtggaacaatcttggtatactgcaacctctgcctcccgggctcaagcgatccttctgtctcaccctcccgagtagctgggaccacaagcatgcaccaccatgcccagctctggctaattttttgtatttttggtagatatttttgtatttttgtttcactgtggtgcccaggtcagtttcgaactcctgacctcaagtgatcccctggcctccaaaagtgctgggatgacagatgtgacccaccacgcccaaccaagtattggataactttttagtttctttttcttcctcctttacttccgctcaggggtctaggtctgagtcagggcttgagggtgtccccatgggggctggtgttacccaggacactgcagcggctagcagggcttggctgggctggcgaatgagggccccacttctcttttttgtacagggaagggaccgaggatctgagtgacatctgtaggtcagagggcatgctgaccttgaaagcaaggtgggaatggagttctatgagctgaggagtcccagctggctcgcattctagagaagcgccataaagggagtctattcattagccccagggagagagcctcccgctccctccctccccgccccccaccccaccccacccttaggagctgctcaccttcccctcgcctggggcacacacctgcttctccagggaccagacctgaagtgcaggaaggagccccgcggccttctgttaccgcagcgctctgcctgccatcgttgaatgtgtggactctttggttgctttcataaattctgttttatttcctcatcatgtttgctgaaagcttgaatgtatccacttggctgttttccaagtattctcatgtgcattttaagagtctcctgtctttaaaataatgtggaggcagctctgaatatactaaaaccattgaattgtacccttcagatgggtgattttgtggtatgtgaattttatttcaatgaagctgttaacagaaatagtacagagtccgtactgttgtgttttctggagcacctggagtcccctctgtccctggccatccctccttccccacacctcacccctgtacctcaccttccccacccccctgcctcacccctgcacctcaccctccccacgcttcccgtatcagggagcttcttaaacacagaatggggtgttaagatgattggagggcagcagcctattggaatcccgatgaacgtggaaaggtgtcagggaggggtagctgtggtgtggaggagccccacattttcgtccctgtcttgtcacaaagaaggagcccatcgctgtgattagaaggacttaggccgggcatggtggctcacacctgtaatcccagcactttggcaggctgaggcaggtggattacctgaggtcaggagttcaagaccagctggccaacatggagaaaccccgtctctactaaaaatacaaaaaattagccaggcatggtggtgtgtgcctataatcctagctccttgggaggctgaggcaggagaattgtttgaaccagggaagcggaggttacagtgacccgagatcacaccattgcactccagtctgggcgacagagcaagactctctctcaaaaacaaacaaaggaaaaaaacaaacaaaaaggccggggctcggtggctcatgcctgtaatcccagcactttgggaggccgaggcggtggattgcctgaggtcaggagttggagaccagcctggctaagatagtgaaaccccatctttactaaaaatacaaaaattagctgggcgtgatggcaggcgcctgtaatcccagctactcgggaggctgatgagggagaatcatttgaacctcgggagggcagatgttgcagtgagttgagatcgcgccactgtactccagcctgggcgacaagagtgaaactccttaaaaaaataaaaaggaaacaaacaaacaaacaaaaaatcagctgggcatagtggtgggggcctgtagtcccaggtacttgggaggctgaggcaggagaattgcttgaacctgggtggctgatattgcagtgaggcaagatcatgccactgcactccagcctgggtgatagagtgagactccatcttaaaaaaggaaacaaaaaaaagccacaaagaaggacttagaattgggtgctaagcaggcctcttcctactgataggtggacacatctatttctttattattattattattattatttttgagacagagtcttgctctgttgcccaggctggagtgcggtggcatgatctcggctcactgcaagctccgcctcccctgttcacgccattctcctgcctcagcatcccgagtagttgggactacaggcgcccgccaccacgcccggctaattttttgtatttttagtagagatggggtttcaccatgttagccaggatggtctcgatctcctgacctcgtgatctgcccgcctcggcctcccaaagtgctgggattacaggcgtgagccaccgcgcctggcctatttctttattttttaatttttttttattttttatttttgagacggagtctcgctctgttgcccaggctagagtgcagtgagcgatcttggctcactgcaagctccacctcccgggttcaagtgattctcgtgcctcagcatcccgagtagttgggactacaggcgcccgccaccacgcccggctaattttttgtatttttagtagagatggggtttcaccatgttagccaggatggtctcgatctcctgacctcgtgatctgcccgcctcggcctcccaaagtgctgggattacaggcgtgagccaccgcgcctggcctatttctttattttttaatttttttttattttttatttttgagacggagtctcgctctgttgcccaggctagagtgcagtgagcgatcttggctcactgcaagctccacctcccgggttcaagtgattctcgtgcctcagccttctgagtcgctgggactacaggtgcccgccaccacgcctggctaaatttttgtatttttagtagagacagggtttctccgtgttagccaggatggtctcaatctcctgacttcgtgatccactcgccttggcctcccaaagtgttgggattacaggtgtgagccaccatgcccggcctggccacatctatttctgatggataaaagtggattcctgaatatgtgatatgcctctctggggacctgtggaatgacattttgcatgtcagaccagcacagtgcttttattctagacttttctaaaccttcccctctaaaccagggaaagcgagtcggttccccggttcctcatcatgggtaatcagaacagatctctgatttaggaagttggtttttttttttttttttttttgaagcagagttttgctcttgttgcccaggctggagtgcagtggcgcgatcttggctcactgcaacctctgccccctgggttcaagcgattcttctgcctcagcctccccagtagctgggattacaggcgcctgccaccacgcccagctaattttgtatttttttttaagtagaggcggggtttcaccatgttagccaggctggtctcgaactccagagctcaggcaatctgctcacctcggcctttcaaagttctgggattacagacgtgagccaccacacccggccaaggaagctatttttgtacttcaaacagaaaaactgagctgccagtgagcacatttcagagtaggaaaactcatattattcagcctacctgtctttcttccaaatttcaatttagagataaacacaccgtagcttttaagttgccaagaaaagagacatgagatgtactcaaatgccttcattttcccagtaggacctcatcattccaggtggttgaagcatccagtaggcgggtctttgttccttgctcacacacccagttaaaagcaaaggcctcccctcatctagagccaactctgagcagggtcgttaagcatcaactgccaagcataaccccctataaagttgcttgctatagtagttggtgcaaagctgactaaatgggaattaaaaactgtctctagccaggcacagtggctcatccctgtagttccagctactctggaggtcagttggaggattgctggagtccaggagtttgagaccagcctgagcaacatagcgagatcgcctccctacaaaaaatacaaaaattagctgggtttggtgacactcacctctagtcccagctactcaggaggctgaggcaagaggattggccgagtctagtcgttcacatctagcgtgggaaacatgttgtagacctcatctcatattgtatacctcctcaaaaccaaaaccaaaaaaccccaaaagcaaaaaccaaaaaaacccacaaaaccaaccatgaaaacacccctgtctctggaactccttgtccaaggtccctgaggctaatgtgatttggaacagaagccaactttcctgcaggtttagaaagtgtcacatacaggctctttctcattcaagcgtataagaacaggctttcttggccgggcgcagtggctcacacctgtaatcccagtactttggaaggctgaggcagtaggcagatcacctgaggtcaggagttccagaccagcttggctaacatggcaaaacgacgtctctactaaaaattcaaaagttagcgaggcgtggtggtacgtgcctgtaatcccagttacttgggaggctgaggcacgagaattgcttgaacccgggaggtggaggttgcagtgagccgagattgcactactgcactccagcctgggtgacagagcgaaactccgtctcaaaaaaaaaaacaaaaaaactaggctttctttcttttttttttttttcttggccacatgcaccagattgaagaataagctttcttgtctgttctctatacagtgatatgtaaaaatcaccactcagatcaaagaattgagaactgcgcagccaggcgccatggctcacgccggtaatcccagcactttgggaggccaaggtgggcggatcacctgaggtcaggagttcaagaccagcctggccaacatggcgaaaccccgtctctactacaaaaatcagccgggcgtggtggcacgtgcctgtcatgccatctacaaaggaggctgaggcaggagaattgcttgaacccgggaggtggaggctgcagtgagctgagatcacaccactgcactccagcctgggtaacagaggcgactctgtctcaaaaaaaaaaaaaaaagaattgagaaccgcgcacactctcacaagcactcagcagtggtcagtccattcttgggtgggtgatcggatatgactggagcaggtgctccctgtcactgtttttgttgttgttgttgttttttgggagatagggtctcactctgtcgcccacgtggaatgcagtgacgcaatcatggctcgctgcagcctcaacctcccaggctcaggcaatcctcccacctcagccttccaagtagctggaactactggcacgtggaccgacgaattttttggaattttttgtagagatgaggtttcaccatgttgcccaggctagtctggaactcttgggctcaagtgatccatccgccttggcatttcaaaatgctggaaagccaggtgtgagccattatgcctggccttagtttggttcaggctttatactaagtgcatctcaaatattttattgaacatcctttcatttctaagagtacttcagttatctctgttaaaatgaaccaaccagaaagattcccactcaagtgcaggacaacagatattagtatcaagaattaaggccgggcacggtggctcgctcacacctgtaaccccagcactttgggaggccaaggcggatggatcacctgaggtcaggagttcaagaccagcctggccaacatggtgaaaccccatctgtaaggtgggctgagtggctcacacctgtaattccagcactttgggaggccaaggtgggcggatcacttgaagtcaggagttcgagaccagcctgggcaacatggcaaaacattgtctctaccaaaaatacaaaaatgagccgggtgtggcggcacacacagctacttgggaggctgaggtgggagaatcgcttgaacctgggaggcagaggttgcagtgagttgagattgtgccactgcaccctagcctgagtgacagagtgagaccctgtctcaaaaaaaaaaaaagaaaaagaaaaagaaaaacaaggctgggcacggtggctcatgcctgtaatcccagcaatttgggaggccgaggtgggcagatcacttggggtcaggagttcaagaccagcctgcccaacatggtgaaaccctgtctctactaaaaatactaaaaaattgattgggcatggtggaaggtagctgtaatcgcaactacttgggaggctgaggcaggagaatcatccaaaccagaaggcggaggttgtagtgagctgaggccgcaccactgcactccatcctgggcgacggagtgagactccatctcaacaacaaacaaaaaaaccaacaaaaaaacaacaacaaatcaaaacaaaacgagcacttgttgggaacagcagggaaagccctttgtgtatatgtttagctgcttcgcgtctgcttttagaaagaagtgtccgtgccatcggcaggtgagccgcaggcttcagtgccattgggagatactgtatagccaggcttccagagccgcctctctccctgcccacgctggcccatgtgctgatctagtgtgaagtttacagatagcttcgggaactcctaggaacattttgcttattattgctgtggtttctgataagataagctttgttgaaaacagtataattcaagtatgatagtaacaacaagatgcagaaaggcggtttctcgttctgaaaggtgctttgctgtgaagccataatacagtgtgttattcgagaatcctgggaggagtctctgggatcctagttgactgtggtgggagaacttgttctgctttcctttctttcagattagtggatcatgtttctacatccatagtaggaacaatgcaatttgtcagtaagtttttcatactgcagtcaccctggagccagtgactgagtggattctccaccatggtgtttctgtaacttattgtccgtctgctggagcggtgctggctggctttggccactctggtttatgtctcttggctcggttttctgccactactggattttgcagggaagggcaggctgtctcatttttcacagtttcacctttttttttttttttgaaagcctctgaattgagtattttggacttggagaattagaactatccccaaatcatcaattacatgaaatccatctgttctacagattataaagaaaatataattaaaatggagttttaaaaatgtatactttgattcactcttgttcattctaacatggtaacatgtaaaaggggcctattctagttaatgatttgtttaaaaaatatttggttaatgtttcagaataaacaacttggtactttgtgttcaattagtagcttcagtgtggaaattcttaggaatcttcaggacagattggccagtctggactccggattaggtaactctcaggtacccagcaagactctcacattcttaggaatgagcttaggaatgaggacttttgtgagataagtggggagatgttttataaactccagttgtctccaggaagttggttgatgatggacttccgaggctagagtcacgctagcacacagagccctaggattggggcgatggccccggcctcttccgttgtgaaggggaagcggaaactcagtctctggctcaggaattccacactgtggggtcccttagctggggctggccctgtttgagcctgactttatgaggcatgttggctgacagtggcgagagggccagccacgggggcccgggccttgctctggtgccctgtgtgcttcgggctctctggattgcctcctgggcgatgctatagccttgctgaccacgtgctacaccccccatccttttcctgaaacagagcagctgtgtcctggcatctccagcagggctgcccttgagggttctgtgcttgctgcttggtagcagccccggcatctggacttcaccacagggcctagggggccttcctcgggttcaccgatgcccacagggcctggggggccttcctcgggttcaccgatgcccacagggcctggggggccttcctcgggttcaccgatgcccacagggcctggggggccttcctcgggttcaccgatgcccacagggcctggggggccttcctcgggttcaccgatgcccacagggcctggggggccttcctcgggttcaccgatgctcatctgccgtaacctgcctgaggccctagggttttgtcagttaatggatgtggctacagccagggctcctgccagcctgttgcctctccctgtccctgagcattttcacagtccagcccgccacccaagaggggctttcttcaggagtctgccccctctgtggctgaatgctgcctcctttttcctttctccctggcccacacttctttcttctttgctctctttttctcttttgctgttcttgaagttttcattatggaagagttcaaacccatatgaaagtggagagtagtgaaatggtgcactggtacccatccccagtcacagcaacgtgcaggcatgcctctggtgacatctgtgcctcaccccagattctagaggtatttctaagtatttcagtacatgtgtctaaaaagcagtgctctttaaaaaattatgaaaatgtcatcacacctacaaaaatgaacagttccttaatatcatcaaatatttatcagtgttcaaactttttttttttttttttttgagacagagtttcgctgtttttgcccaggctggagtgcagtggcacgatctcagctcactacaacctccacctcccggattcaagcaattctcccgcctcagcctcccgagtagctggggttacaggttcccaccaccacgcccagctaattttgtatttttagtagagatggggtttctccacgttggtgaggctggtctcgaactccggacctcaggtgatccgcctgcttcagcctcccaaagtgctgggattataggcgtgaaccaccacacccagcttcaaactttttttttttttttttttttagcagacaaattctcattttgtagcccaggctggagtgcagtggcacaatcttggctcactgcaacctccgcctcccgggttcaagcgattctccagcttcagcctcctgagtagctgggattacaggcgagcgccaccacacctggttaatttttgtatttttagtagagatggggttttgccatgttggccaggctggtctggaacccctgaccttcggtgatcccatctcagcctctcaaagtgctgggaatacaggcgtgagccacaaggcacctggctgcaatgtggttttaatttaatttgcatttctttaaggactaattgagcattttttcatgtggttatcaaccattcacacatattttctgatgaaatttctatttaagttttttgcccacttaaaaaaaaattgagttgtcttttttttttttttttttttgagacagagtctcattcaatcacctaggctggagtgcaatggcgcaatctctgctcacggcaacttctgccttccgggtttaagcaatttacctgtctcagcctcctgagtagctgggattacaggcatgcgccaccacgcctggctgattttgtatttttagtagagatggggtttctccacgttggtcaggatgatctggaactcccagcctcaggtgatccactcacctcggtttctcacagtgctggggattacaggtgtgagccaccgcacctggcctgagttgtcttcttaattataagatttccttatatattctggacacaagtcatttaacagatatatgatttgcaaatactttctcccagtcagtgtcatttttttgcttttattaatgtcttttgagtatgaaagttttaaatttttatttttaagttttggggtacatgtgtaggatgtacaggtttgttacataggcaaacgtgtgccatggtgatttgctgcacctgtcagcccatcagctgagtattaagcccaggtattttctgtaatactctcccccctcccaccccatcccctgaaaatttttaaatttttatgaaatccaatttacacttggcagaataaacctgcattctttctgaagagtttcattttgtgttacgtccatgtgtgagtcaccctacttagcgtttatgatttttgatatcaagggtctttttccctgagttattcgctaccaaggactctgcagagccaggaaggcatttctgaatgggcggtgtgtgcttatctatgttatctatgtaacatatctatgttggcatgctggatccttgccggaacaatacctaaaacttcagaactgatctccccacgtaagaccctggctgctggcgttcagtggccagggtcctactcctgtggttcatcacgccaggtgctgctggcagcccatttacagggtgctgcctgtcctgtggctgtgaccgtctgcagtggcccatggaggccgtgctgcctcctgcacgtgaggagtcagaggctgtcactgtcagcaccgcccctgttggcggcttctttgcatgtggtgaaaaagccaagctcgcgatacagcctaatcccgattccctaaagcggcccgcagccttcttggcaccagggattggtttcatagaagacgcctttccacagacgggcagggcgttggggtggtttcaggatgatactgttcagatcatccggcgttagagtctcataaggagcgcgcaacctggacccctcgcatgcggagcacacagtaggctttgcgctcctgtgagaagaacctgatgctcctgctgatctgacaggaggggagctcaggcggtaatgctccctcacctcctgctgtgcttccccgttcccagcaggccacacaccagatctctcccagtccgaggtccagggttggggacccctgctgtaaaggcttagggtaacctagtctcatttggcaattacaggtgaaggacttaactaagtacttggatcccagtgggctcggcgtgatcagctttgaagacttctaccaagggatcacagccatcagaaacggaggtcagtcatccccgccatgagctcccacctcctctcccgttcctcagccaccctctcagccacctgcacatcaccaggctcctcgtgctgactctaacatctttccttctccttgaagcccccaacataccccaggtttccaggtggtctctttcctttcttgttaccttctcctcacataccctgttttccagaatttgctgcgttaactacttttccataatgctagaaagcaactgcccccttcctcaaagatttcatgatgacaatttgagaattttcaaaatattgaaagaatgattccatggccacccaagtgggtgttcatcacccgtgctctgcaggcagcacttcgtcgcactctctccccacgtctctgtccatctccagtctgtcccccagcccctcttgaatgggatgtgtttgtaatcagcatgcttccgcgcacaccgccctgaacactgcagcccgtaccaccatcgttccctagagctcagtgtttgtttccagtcttcctttgagtaaaaatttacctgcagtgaaatgtacagctcacacctgctcctctgtgagctccgacagagtcctgtgcctggcagtgcggagcctgtcacgcacatcactgtccccatgtgggtgccgcatacccctcgccctcaggcagtgccttccctcctgctggcaccattgctgatttctgtcaccatggattagttttgcctatctctcttttttttctttgagactgagtttcactcttgtcacccaggctggagtgcaatggcccgatctcggcttactgcaacctccaccttccgggttcaagcgattctcctgcctgagctgggattataggcacccaccaccatgctcacctctactaaaaatacaaaacatataaaaatttttgtatttttagtagagacggggtttcaccatgttggcggggctggtcttgaactcctgacctcaggtgatccgcctgcctcagcctcccaaggctgaggtgctgggattacaggcatgaaccaccgtgcctggccagtttcacctgtcttgagggttcgcgtgctctcacttggcttctttcctcagcacgatcccttccccagcacgatcccttccccagcaccatcccttccccagcaccatcccttccgcagcaccgtcccttccccggcaccgtcccttccccagtcccccggcaccgtcccttccccagtcccttccccagcaccatcccttccccagcaccgcaccatcccttccccagcaccgtcccttccccagcaccatcccttccccagcaccgtcccttccccagcacgatcccttccccagcaccatcccttccccagcaccatcccttcctcagcacaatgtcttccccagcacaatgtcttccccagcaccatccctttcccagcacgatccgttgcgtgcttgtgccgtatttcgtttcttcattctcctggtgatgggcacgtttgtgtacaactctttgtgtggatgcgtgtcttcaagtccttggggcctgtatctaggagtgggtcatgtgctggggtaaactcggttcttcacagtggccgtgccttttcacactctcaccagtccccatactatacactgtccgtcttacgtcaagttctgaagctctgaacaggccatctcacttcctcatgtttggccaggcggtgtaggggtgacggtggcgggtcctttccctccttcatgcacgtgcaggataagtagaccttggctggggccctcagagtcagcaggtgcagtgagggagacggatgcccttggacctcgacctcaggtcttgtctgtctcctccacagaattattgcctgacagtgtctctaagggttttctcagatgccaagtctttagatggctctggggaaacgtgctgtgtgttgttccccggtttttttttttttttttttttttttgagacagagttttgctcttgttgcccaagctgaagtgcaatggcatgatttcgtctcactgcaacctccgcctctcgggttcaagcgattctcctgcctcagcctcccgagtacctgggattacaggcatgtgccattgcgcccagctaattttgtatttttagtagagacagggtttctccgttttggccaggctggtctcgaactcctgacctcaggtgatccacccaccttggcctcccaaagtgctggggttacagacatgagccactgcgcccggcctgttccccatttgttactctttatttgactgtctgttcttccacccatgaacatgttgtgggaccagcacggcctctgcgctgggcttggccccggggcctctgtggtgaaccagcaccagagcaaggccagcgggctgcggcaggacaaatgggtgaggtgctgctgctgtcagcgtagcaggccgggggtgagatgggaactaggcaggcagccctctctgaggaggggtggaggggagaaaggacaccctgacaaccaggtaaagaccatctggcccaggtgaggaagcagtcctgaggtggggcgaggggcccaggacgaggatggagagatactgcaggctctgcaggctgagaggagcgtgcaggcaagctctgggtcaagggggcctgcagagcaatgggcagagtgggtggccacagaccctcaggaggcagcattggcaggagaagggggaggaagaggacagtcaggaggcctcagagtctgcaggctgagcaccagcaggttgaggctgatggggccgtgtctcagtctaactgataagctgcaacccttaagtaacatcttaagaggataggtgtgtactttatacatttatttaacgtttgtccttctgtacaaagctttcagtagcggctttgtgagaattttggcgtctcacatactgtgccttgaggcttgctgcatggcgtgctgcaggtcctccctccaggccttctggaaagtctggttctcctcaggttactcctgggacatggcagctgtgcccatgaccctcgggatgagtttgttctctaactgattcaccggttagctctggggagattctaggtgtaaattttttcctcttagtttgaaaaatccattatgggccaggcacagtggctcatacctgtaatcccagcactttgggagactgaggtgagaggatcagttgatcccaggagggtgagaccagcctgggcaacatagtgagaccttggctgtgcaaaaaaataaagtagttgagcattgtggcgtatgcctgtagtcccagctacttgggaggttgaggtgggagcatcccaggaggtggaggctgcagtgagctgtgtttgtgccactgcactccatgcactccagcctggtgacagaccctgtctcaaaaacaaacaaaacaaaaaaaacttgccattaattccaaacagaattttgtgtgtaatagagaatgcgatctttatgacactgatgctttggtacttgctgggccggctgggtggtttttatgcatgtgatgggtacgcctgagaggatgcttcttttctaatcattggtcccctgagttcatggaggtgcgagctggagactcacgttagcttggtctcagtcgcagggaggagaaaagccgctcatgaagctggtagctgtgtcgtttttgttttgtatagctgtgtttcgtcttcactcttaagtcaagaattactggatgcaggcttctaggttgatggtgagggagcccggggacccccagaactggttgtcatcggagaggcctcagtgtttggggctgagatgggtgcatggaggccaagcacaagaccccaggaggcagttaccacttccatgaaaaacaagaagtggaataagacagcctgtacttcttggtccagtaacaagccatattttacatagccataatagttaaattgaatattgatgtaactgaagatggcgatgtaaccattttggaagattggaggagggaaaatggggcagggtgcagtgtggcagggcatctcatggggactgtttggcaaaacagagggaagtagatgcgagcttagaggggagtgtgggcggcctgtcagtagccacggcctctcagcactggctcctttttcttttgagatggagtctcgctctgtcggccaggctagagtgcagtggtgtgatctcggctcactgcaacttgcgtctcccaggttcaagcgattctcctgcctcagcctcccgagtagctgagaccacaggctcgcgctgccacacctggccaattttttgtgttagagatggggttttgccatgttggccaggctggtcgtgaactcctgacctcaggtgatccacccacctcggcctcccaaagtgctgggattacagacgtgagccaccgcgcccggccagcagtggttcattttctagtgacaggcacgtgtatgaaatcacagggaacaggactgtaactccacgcattttgaataaaaccaggaattctttgttgtgactgctggtcttgttataaatgttacaacccatttcctcggtgccacaaagactcagagcactcagggccctggccagtcactggctgtgctggtctcggcttgtcatagggtaaacttgctctgcacaatgtggctggcagagcgtgttcctgggcctgtgactgagggcagcctgcaggagatttgggctggagatgtgttccctcgggagtcagggacacagcctgtcatggagagttaagacgggtcttttgtaggtttggacaggtgaagtgctcagatccctctgcagggtcaaggctgggaacagcagtggccccgggtaccatgacatgggcaggagggagccacctgggtccacgattctgtcgtcagggtaggggttggtttgttcctgtggaccatggctaacgtgaaatggggcaagctcagctctaggggttcctgggaggccttggcttggaaggtgcccactctcagctcaggagtcagggtgtgggagatgcccaccaagcaaaatgaagcctctagcctggcctgctgccctcggaggagcccgatgctctgtctgggaagcctgggggctgccagctgtggactgtggctgcctgtggttgccggtgtcttggcttagtgactgaaggggtgagagagtgatcgtccaaggacagcccatctccagatgtttcttagtggttgcccagccacctgacacgccaagctggggccttctcccagacaccgtccccttctctctttgctgtcacctgggccaatcccacagcagctggggcaccccgttctccttcccagcagctgacagatgggcctgggagggctcctgcgcctgtctgcttgagagggcggtgagctagtcatcgtgagccggccagggctctcctatctcactgcattagagcttgagccaggctggtggaggtggctgcagccgagggagagcacggctggcacctgtgaggaccatggatggggacacatggggcaacgggcccgtgagtgctgtcgaaccagcctgttccaggctctgggacgtagcacgaaacggcagtgcagaacccctgcccttgggagctggctttctagtgggagacagaccacaaagtaaggcaggagctagggaggcagaggagtggggaggcctccctgagaacgtctgggatgggaaggcagcatcccagcagggctgcacctggcatgtttggaggccacagggaggcagggtcagaaggagcaggtgagaggcaggcctcacaattctgtctccagctccaggctcctgaagaggatggtggggcatccctgagagctggtgtgaggggtgggacactgagctgactgcagagctgactgcagagtggagtgggcgtcagggaggaggtgcagtagcctcagggaggaggtgctgggacgtcagggaggaggtgcaggggcctcagggaggaggtgctgggacgtcagggaggaggtgcaggggcgtcagggaggaggtgcgggggcgtcagggaggaggtgcaggggcctcagggaggaggtgctgggacgtcagggaggaggtgctggggcctcagggaggaggtgctggggcgtcagggaggaggtgctggggcctcagggaggaggtgctggggcctcagggaggaggtgcaggggcgtcagggaggaggtgcaggggcgtcagggaggaggtgctggggcctcagggaggaggtgcaggggcctcagggaggaggtgcaggggcgtcagggaggaggtgctggggcctcagggaggaggtgctgggacgtcagggaggaggtgcaggggcctcagggaggaggtgctggggcctcagggaggaggtgctgggacgtcagggaggaggtgcaggggcctcagggaggaggtgcaggggcgtcagggaggaggtgcaggggcgtcagggaggaggtgctggggcgtcagggaggaggtgctggggcctcagggaggaggtgcaggggcgttggaggaggtgcagggaagtcagggaggaggtgcaggggcgttggaggaggtgcagggaagtgagggaggaggtgcaggggcgtcagggaggaggtgctggggcctcagggaggaggtgcaggggcctcagggaggaggtgcaggggcctcagggaggaggtgcaggggcgtcagggaggaggtgcagggaagtcagggaggaggtgctggggcgtcagggaggaggtgctggggcgtcagggaggaggtgcagggaagtcagggaggaggtgcaggggcgtcagggaggaggaggtcctggggcgtcagggaggcggtgctgccatggcattggacacatggcctctggggctgcggggtctgctttacttttgagtaatttgatgtcatgatttatgtttcgttcggaaggagagtgaaactagaataaaacgaagtcgaagatgattttggaattatttcatagcatttagaagaaaggaaaatgtgatcatccaaaccgcacttcagccaaagttcacttcaggtgttagctccatcgtggctgcagcagcctgtgttgtctgtcagccctgtctgcgtcgaggagtgaccagcaggatgtgctggcctagtttgctgggaagcacaaggaggctttcctgtcacagccacaggccttgtttcaggaatagaatgagatagagagggattgttccaaataggccattgctgtgtctcacacaccctcacgctttggaagaataagggaaacgcacgtgaaaaattcctaattaattgaaaattgttttagtttttataaggaaaactaatatgagaatggtatttaggtcctaccaagaatataaaaatgccatctgtgttcatatcccctgctccgccctctggggcaagaccctcagattgtttgcccactgtcagaacctgagctgtcatgcgctgtgtccaaaatgcttcgctgtatattgaaagtttttagttctgtgtttcagtgtttataagcgcaggcaagactgttagcattttaaaatgtaatttaatttttaatttattattattattattattattttgagacagactctcgctgtagcccaggctggagtgcagtggcgcgatcttggttcactgcaacctctgcctcccgggtcccggttcaagctattctcctgcctcagcctccctcccaagtagctgggattacaggcacataccaccatgcccagctaatttttgtatttttagtacagacgggttttcaccatgttggccactatggtctcgaactcctgaactcgtgatctgcccacctcagcctcccaaagtgctgggattgtaggcgtgagccaccatgcccggcctattttttattattttaaatgtattatttatgtatttatgagacagggactcactttgtcacccaggttggagtatagtggcatgatctcagctcactgcagcctccacctcccaggctcaagtgattcttgtgcctcagcctcccgagtagatgggactacaggcatgcccccaccacacctggctaattgtttttgtggagatggggtttcactgtgttggctgggatggtctagaactcctgaccttaagtgatccgcccgcctcggcctcccaaagtgctaggattacaggcgtgagccaccacacccggccttatctttattttttgtagacataggatctttgctatattgcccaggccagtcttgaactcctggacttaagcaatcctctagtgtcagtcttccaaagtgctgggattacaggtgtgagccaccatgcctggtctccacttttcttttttcttcgagacagggtcttgctctgtcactcaggctggaatgtagtggtgcagtcttggccaactgcatcctctgcctccctggctcaagccttcagagtagctaagactacaggtgtgtcccacaatgtccagctgatttttttcttttcttttctttctttcttttttttttgagatggagtcttgctctgtcgcccaggctggagtgcagagtggtgtgatttcggctccctgaaacatccgcctcccaggttcaagtgattctcctgcctcagcctcccaattagctgaaattacaggtgttcgccactatgcccagctaatttttactatttttagtagagatggggtttcaccatgttggtcaggctggtcttgaactcctgacctcaaatgatcctcctgcctcagcctgccaaagtgctgggattacgagtgtgagccactgcacccgacctaatttttgtatttttgtggagatggggtttcaccatgttgcccaggctggtctcaatcacctgggctgaagcaatccacctgcctcagcctcccaaagtgctgggattacaggcataggccaccgtgcctggccccaaccttcacttttaaaataagtgattgacattagaatagattgtgttaaaggtattaagtaatgctattttataagtagctggtctattttaggcaagtagttgaattaatagtgagacagtgtgaagacacctaagtgtcttctgtcactcacaggccctggaaggtgctttgacctgtgaatatcactgagacgctggaagccagtgccttttcctacaggaggagaggcaggtgctgcgggattggttgtgtttgcaaagtgatgactgtagctgacgtaagaattatagcctgtctctcatgagaagatagcttttcctttaaagtttttctcatagaacattgattatagaagataagcaaaaaaagaaaataaaatgaaaactgcgcgtgaacccagcacccaggaaaagatgttgtttttgtattatttcatcatacctacaccttctcatgtaaatgtttttaaaggtttaaatctgattggtacctaacactttttaaaggccatggacagttttatggagctcaatgtcttgctctttttttttttgcagtgctgtctgcttcttttaagaaataaaaagtttatctcctacctctgcatctcctcctcagaattctctccagaagccttgttcctgtgggcaacgcatctctgacccgttggcaaggctgttttctctccctggatttctcatgctcactcccttgcttgtcttgaccccccccagggcccccaactcccacacatctgtccctgggggcctccttcccagggagtcccgaggccgccaggggtcccgtcactgggtggctatgggtggcctgttgagcacgaggtcttctccctgcagatcctgatggccagtgctacggtggtgtcgcttctgcccaagatgaggagcccctggcctgcccggacgagttcgatgacttcgtcacctatgaggcaagtggttttcacccaggagcttgggggaagtctggcatccacctcttcctttatgccctacagctcgtgcctcctgcctccgggctgtcttccgtagaagctggcgtgaaggaagggcctcccgccctgtgtgcaccgtggggctctgtggctgtgacgggaggcccacagttgtctgtcccacacgccctgtcagcctgggcaggaatcctcccccagggcctgtcgccagcagaagtggggtgggcagtgatgtcatgaccacccgctgccaggctggcaggcacaggcggagcagagggcttgggaggattccttttgtcaacttgcaaatgattttctgtgtttggggatgcctgactaatgcctgcccctgcttggctgtcctccaccctgctcccagatgcagccagggttgtcatggtgacgtggcgtctcctgtgtctcctgtcactgtgggtcccttgttctcaacatagctggggagagggtcttcgagcacagccgtggtcgacagagcgtaaccatgtccgccggtctggagggttagattccaggagagccacgtggctgcagcagaaaatgcatgaagttgaacttgagcccttgggggccgccgggaaggtggaggtggcagccgccagtcctggtcagcctgctgccgagcaagggtaccagaagtggggctgagctgctggccggtagggcctgggcttctcatgtcagtcctctgagccctgactcctcgaaagctgaggctggcacagggtagtttttgagttgcttttggacgccactgtaccgtgggagccatggtattatactcagttccctgttccgagaagctgccccagggattagtcaccctcacccttgggtgggcagcttaacttctgcccacacagaccctgggggtggttctgccttacggcggtgtcccagttatcagctgggctgcagcttctggggccagggcgcccaccgtgggtcccatgtttggccttggtgtgctctttctgcacgtgaggcagcagtgaggtgctggctaagagggcgtgtggtgggagttggaccctctcgcatggctgcagtgtgcagaacgtgctgggagaccccaggactacagacggtggctcctgtgccctgagaaggacccggcttcttcacgaggagatgcccaaggctctgcagggtaacccagagcccttggtctgcaacgtccggggaactgtgtgttcctgggcgttcatgtgcctgtgcactctttctcacgtgtatccgtctttttgttcccctctcatgtttgttagggcattgttgattgtttatatcctatgtatggtgcagtggctgaagagtggcctctcaaaagatatgtccacccagcagctgtggatgtggccttatttggaaaaagggtctttgcggatgtagttcattaaggatctcaaggtgatatcatgctggtttgggccctaaatccagtgacaggtgtccctggaagacgggagagacacacagggggaagaccataggaagacagggcagagactgaccagagccagggaactcctggggctcccagaagccagcagaggcaaagatgcatcctctccgagagccttaggcaggagccagccctgctcacaccttggctttggacttcgggcctccagaactgagaggataaactggtgtttcttcacgccccgtggtctgtgctagttcgttatggcagccctgggcagggaaaccttgagtgacgttactcgaggcaccaaaggcaccagtgcattttatccttaaaggcccacgtggtctgaagggtgtggccgagcctcacgcttgtcacttcagaagggtgggaacctgacatgtcagagctaatccttctcatatttttagatcctgatttcttttttagaatggaagaaagttttttgacttaaaaaaatgaatatgcttcatgttttagagcaattttaggtttacagaaaatggaacatagtgtagagcattccgggatcacgttacatgattatttgttttgttttgtttgagacggtctgctctattactcaggctggagtgtggtggtacagtctcgatcttggctcaccacaaccttcgcctcctgcgctcaagtgttcttctttctcagcctttccagtggctgggaccacactcagtaaccaccacgcccagctgattttttgtattttttttttgtagagatggggtttcaccgtgttgcctaggctgctctcaaactcctgagttcaagcgatccacccgtcttggcctcctaaagtgctggtattacaggcgtgagccaccgcacccagcctgatatgttagtattagccaaagtccgtagttgagggttcactcttggtggtgtgtattccgtgttttgacaggtccacgattatagtgtcacagagtcgattcagtgccggctcatccctcacaccagcccccacaaccaccgatcctccgtgtctccacagctctgcctcttccagaacgccacggagctagaaccatctggcatgcagccttttcagatgcgcctctttcccttagtgaatacgcagttacctctcctccatgtcttgctttgctttttaagggtgggatgtaattttccacaaagtggagttcgatactgtgaaacttatggaaaatttgctcttttaaaaaacagcttgcacatcatgtcatcttaaaaaaaaaaagtctaataaagatatgagtagggagtatgtgttccatccagataccctattcggggaccctccactggtagtcttcaggtaaataaacctttgattgattggttgattggttgattgattgatattctgaatggttccagtcagacccatttctctttactgggagcatcgcagtgctcacaccggggtggtcgggtaaaatgtgcagttagtcatggccgagctagtgggtctgctggctcgcactgttttcccagggatcctttcagcaggcagcttataacgggaaagttgctgctatggtgtctgagtaagtggggagagtagaaggggatggactgtggcgccgctgagttcctgggcatggtgatgtctgaggatctgagcaggtggagcccagggggtggtggggctgtttgtcgggtttctggaagagcgaagggaaagtcagggagtgtaaggcgcatctcacagaatcgtcgggccgcgctctctcccgtcctccctccttctcccactactggcgatgtctggagcaaagagctgccttagtgaaatgatagtgaaatgtgtcttttgtgcaaaccattatcagcttaggaagccaaaaacaaaagccactctgttttcagccctgactgactaaccgttttttaaaccagcaaggacacttcctgaactttgccttcccctccctgggcaacaccagcaggaggtttattagagcgtgtctgggagcaggttaaactttctcctaggtggtgatgtgcctccaggtgagcgcacaggctttgcagaaaccccagcatgacaagcaagtaggaaggtgacattgttgtttgagaaaagccagtgacccggttgggacggagacacgatggggagccggtctccaacagcatgcccttcctgaaggtgtgtacagagccaggcccagcctgtgaggccacccgggccagcatctgagggtaagaggaggcagtagtgtgcactgtgcccagtattcctatttctgtggtggagagaggctcagggaagaaggaactgtgacggggacagtgttggccccacttgagttactgatggccctgaacgggctttttctctgtccgctggtgatttaggggacttgttaattagtgaatgtaacgtttcaacatagcgacgttttccaagatgcactttgattttcaagcgagttcatcttaacattggtaatttgtaaaaatgttaaaaagttggtagcatagacttgatggcttctgggcaaggccaggtcctggctggctggcaaataaaataaactgccggggccggtgtgagctgttactgcattttatccaggaggccgggagtgagcaggcaccgtgctctgaggtacatttttgtctctggaaaggcaggtgatggctgccctggaaaactccatgtagggaggccttgaactgcagaaaccaacccgcagggctgaattgggaagtgagcaggtggggtggctcctgtgagcctcatgagctgtctggaacccccagggcatccagccggccaggggctctgagtatcgatggcgatggcatggaagtggacgtccacaaccccagagcaaataaaggggtgggtgcagtcaccgaagccgctgaggagtggaactgttcatctctgtgggatctacagtgcacggagccactctgcaatggcagggaggcccggcttactttattttttattttttaaattgttttttgagatggagtctcactctgtcacccaggctggagtgcagtggtgcgatcttggctcactgcaacctccacctcccagattcaagtgattccatgcctcagcctcctgagtagctgggattacaggcgcccgccaccacacccagctaatttttgtatttttaggagaaacagggtttcaccatattggccaggctggtctcgaactcctggcctcaagtgattcacccaccttggcctcccaaagtgctgggattacagtgagccactgcgtctggccctcaggcttactttagaaatgagaaggtgaaggtgggtccagagcggagcgtgtgagttccaggcttggcagggtgccctggcatccagcttacagggagtctgagtttgtgtagaatctgcctcattgttcctgtgtccgtggagaattctttccatcccaaaccatcctgtctaagctctgaggaggcacaggtggctctaaggcggcactggcttttgcctgcaggggcaccatcctcagctacaggtctaacaggaacttggtgaaataagcaggccccactgcccggacctccctcccttcgtaggacagatgctctgctcagggctccatgagctgtttgagagaaggtgtgggtttgttcttagaaacatcatgctttctgttggggacttagggtccacactggccagggaagggcatcgggcatctgtcagaagtaccagtccattgactttttaaaagctggtccaaggtcaggtgcggtggctcatgtctgtaatcccagcactttgggaggctgaggcaggagaattgcttgaacccgggaggtggagtttgcagtgagccgagattgcgccactgcactccagcctgggcgacagagcaagactctgtctcaaaaaaaaaaaaaaaagaaagaaaaaattttaggctgggcatggtggctcaggcctgtaatcccagcactttgggaggccaaggtgggcagatcacaaggtcaggagttcgagaccagcctgaccaacacggtgaaaccctgtctctactaaaaatacaaaaattagttgggtgtggtggcgtgtgcctgtaatctcagctactcaggaggctgaggcagaatcacttgaacctgggaggtagaggctgcagtgagctgaggtcacaccattgcactccagcctgggtgacagagcaagactccgtctcaaaaaaaaaaaaaaaaaaattagtcaggcattgtggcaggcgcctgtaatccctgctacttgggaggctgaggcaggagaatcgcttggacctgggaggcagaggttgcagtgagccaagatggcgccactgcactccagcctcggcgacaagagcgagactctatcaaaaaaaagaaaaaagaaattttaggctacgtactgaaccactgaacctgatgttgtaataaccacactttttagagtcagcagcgggtcttcctggtgcccctggggtgagtctttgtcactgatgactctggggcagtgtggcccctgtgagtgtgcaatcctgttggggtagctggcaactgccctcaaaccgtctcggacctgtgcgctgggcttcgcatcctgccccgtcatgccttccccacaggcccagcctctgacagacatcctgggcctgcctgctttcctggccactcccgccttttcctgcctggcgtcccgcaggcccagcacaggccagccctgtcctgagtgggccctgggccctgccgtcctgcaggagtgggagctgcccagggacggtgagtagcacgagagctggggtttcttacagtgctctcctggttctggatgttacagtggatgctcttgaggaatgacttagtttttatgaattacttccttagattgtaggggagattataattggacacccagagtaggtacacttcacagcactccctgttcccttgtggctttagaagcagctggcagggatttcccacccaccagtgacactcgcaccctgcagtccttgtttctgtgctttgaaaagcaccttcctgggttgtctttcttggttccatgaggtggccaccttgtgagacgagaatttataacccccgtttgcggcagggctccaggtggttgagtcacacgtctgaggtcacacggcttttaataaaggggccaaagatggaactgcggcctcccgcaagtgcgccaggctcctggcagctcggcctggcccttcacgtctcttccagtgaggctcaggtgggtgcagcctggggtgggaccctctggtagccctcgcaggtcttagcacactgtctacttcttttttttttttttttgagatggagtcttgctctgttgccaggctggagtgcagtggcatgatcttggctcactgcagcctctgcctcctgggttcaagcgattctcctgtctcagccccccgagtagctgggactgcaggcacgtgccaccacgcctggctaatttttgtattttcagtagagatggggtttcaccatattggctaggctggtctcgaactcctgaccttgtgatccacccgcctcggccttccaaagtgctgggattacaggcattaaccacggcgcccagccactttgtctgcttcttacgatactagaactagagtgcaaagggcatctttttctgctgggactgcagcttttctgagatcttgtttatttgcaaattgttaacctcagagtcttctgagcatgaaatgttggccacttttcctaaccagcaatttcattttcattaaggttgaaattataaattgaaaatgttggctgggcacggtggctcacgcctataatcccagcactttgggaggctgaggtgggcagatctcttgaggccaggagttcaagaccagcctgggcaacatagcaaaacctcgtctctacaaaaaatacaaaaattagctgggcacagtggtgcatgcctgtaatcccagctactttggtggctgagacacaagaatcacttgaatccggaggcagaggttgcagtgagctgagatggtgccactgcactccagcctgggtgacagagtgagaccctgtctcaaaaaacaagaacaattagaaaaagaaaaaaaaagttctgtttaatagttctttagttttgtgttcatttgtatgatccacaaatatttactatctacctatacctggtcctatgctagatgctagatacttaagagtaaaaacaagttgggtgtggtggcttatgcctataatcccagcacttcgggaggctaaggcaggcagatcacttgagctcaggagtttgggactagcctgagcaacatggcaaaaccccatctctacaaaaaaatacaaaatcagcgaggtgtggtggctcacacctatagtcccagctactcaggaggctgaggtaggaggattgcttgagcccaggagtttgaagctgcagtgagccaagaccgcacgactgcactccaacctgggtgtcacagtgagactctatctcaaaaaaaacacagcagtaaaaacagtaaaaacaattggttgcgatggctcacacctgtaatctgagcagtgtggaggatcacttgaggtgcggagtggatgaccagcctgggcaacagagtgagaccctgattcaaaataaataaatcaacaaacaaacaaacaactgagccaggtgtggtggcacctgtagttcccagctacagctagatcctgtctctattttattaaaataaaaaagaaattactctgccaggctcagtagctcacacccatagttctagcactttgagaggccaaggctggtggatcacttgagcacaggagttcaagacagcctggaaaacaaggcaaaactccatttctacaaaatttcaaaaaattaggcatggtggcttttacctgtggtctcagctactcaggaggctgaggtgggaggatcacttgagcccaggagatcaaggctgcagtgagctgagattacaccattgcactccagcctgggtctcaaagagagacactgtctcaaacaacaacaacaaaaattactcagagtaccttgttttctgctctcagacatgtacctatttttcatttaaaaaaaagttgaattcagccaggcacggtggctcacgcctgtaatcccagcactttgggaggccgaggcaggtggatcacctgaggttaggagttcgagactggcctggccaacgtggtgaaaccccatctctactaaaaacccaaaaattagtggcgtggtggcacgcatctataatcccagctactcaggagcctgaggcaggagaatcttttgaacccgggaggtgtaggttgcagtgactggagattgcaccactgcactccagcctgggcaggaagagtaaaactccttctccaaaaaaaaaaaaaaaaaaaagttgaattgtgttttattcattttattttcatttttgaaatagaggctcactctgtcgcccaagctggagcttaatggcatgatatcagctcactgcaaaatctgcgtcccaggttcaagccattctcctgcttcagcctcctgagtagttgggattacaggcatgtgccaccacacttggctaattatatttatttatttatttatttttgagacggagtcttgctctgtcgcccaggctggagtgcagtggcgtgatctcaattcactgcaacctccacctcccgggttcaagcgattcttctgcctcagtctcccgagtagctgggactacaggtgcccgccaccacacctggctaatttttgtatttttagtagggacagggtttcaccattttggccagactggtctcgaactcctgaccttgtgatctgcctgccttggcttcccaaagtgctgggattacaggcgtgagccactgcgcccggcctgtatttatttattttaattttttttttttcagacagagttttgctcttgttgcccaggctcgagtgcaatggagtgatctcagctcaccacaacatccacctccctggttcaagcaatttgcctgcctcagcctcctgagtagctgggatacaggagttcgccaccacacccggctaattttgtattttcagtagagacggggtttttccatattggtcaggctggtctcgaactcccaacctcaggtgatccttctgcctcggcctcccaaagtgctgggattacagtcgtgagccattgcggccagctgttatatttatttttaattaattaatttttttgagatgggtctttatcactcaggttggagcacagtggtgtgatcacatctcactgcagcctcgaccttttgggctcaaatggtcctcctggctggcgctgtggctcactcttgtaatcccagcactttggaaggctgaggtgggtggatcacctgaggtaaggagtttgagaccagcctggccaacatggtgaaaccccgtctctactagaaatacaaaacttagctaggcatgatggtacatgcttgtcttcccagctactcaggaggctgaggcaggagaatcacttgaacacaggccacgtaggttgcagtgagctgagatcatgccactgcgttccagtctgggcgataagagtgagaccctgtctcaaaaaaaaacccccaaaaaacaaaaagcaagctcctccgtcagtctcttgagtagctgggacctacaggcaggtgccaccacacctgggcaagctcctccgtcagtctcttgagtagctgggacctacaggcaggtgccaccacacctgggcaagctcctccgtcagtctcttgagtagctgggacctacaggcaggtgccaccacacctgggcaagctcctccgtcagtctcttgagtagctgggacctacaggcaggtgccaccacacctgggcaagctcctccgtcagtctcttgagtagctgggacctacaggcaggtgccaccacacctgggcaagctcctccgtcagtctcttgagtagctgggacctgcaggccggtgccaccgcacctgggcaagctcctccgtcagtctcttgagtagctgggacctgcaggcaggtgccaccgcacctgggcaagctcctccgtcagtctcttgagtagctgggacctgcaggcaggtgccaccgcacctgggcaagctcctccgtcagtctcttgagtagctgggacctgcaggcaggtgccaccgcacctgggcaagctcctccatcagtctcttgagtagctgggacctgcaggcaggtgccaccgcacctgggcaagctcctccgtcagtctcttgagtagctgggacctacaggcaggtgccaccacatctaggtaagttttgtatttttggtagagacaaatttcactttgttggccaggctggtcttgagctcctgggttcaagcgatccacccaccgaggcctccgaaagtactgggattacaggcgtgagtcaccgcgcccagcctgaattgtgttttataagtaatgtctctgcttagagacagttgggacttcaggcgtcagacccctccctccacactgccctctccagggccttgcagcagtgaggtgtggggcgttcgcagttcccctcccagcttgtgcccgctgactgctggcgcactctctcctaggccaacgaggtgacggacagcgcgtacatgggctccgagagcacctacagtgagtgtgagaccttcacggacgaggacaccagcaccctggtgcaccctgagctgcaacctgaaggggacgcagacagtgccggcggctcggccgtgccctctgagtgcctggacgccatggaggagcccgaccatggtgccctgctgctgctcccaggcaggtctgtaccccgccacgggcctcctggagaggccttgggatgtggcaccctgtggaggtgtctgatgggcagactggggtcttggaggagtgcgtgctggttagcatccattatgtgggggtggggcttggccctgcagtagctcctgaccttcctgggatgagcccacaccgtcctgcccgccttgcccgagcagtctccctgttccagctgactttcctgtcaggacgactgtggtttcaaatgttgctcaacatctttagctgtagagatagaaattatagaagtgaatgtctcggcagggttttggaacccgttcacctttgcagcacccctgaggaggccatgttctctccccacctgtcccccaccctcaggatttctgtagcccccgtatttcgagctagttggggccggagtagagggacgggcagagtctgggagaaggtcagatgaaggaggtgtccagtggctcacgtggacctgctttccgtgttgcccctgctactggaaagtccgctcagcacgctgaagtgtaattgtgaagcaaaaattaaattctcagccttcagccaactgatggaccccctctctcagcctcaggcgttgctcagtcaacctgaaaatgtagttcaggccatggttagggaggtcaggcaggcctcattgggcccctccctttggaactgaggcccagctgaccagcattcacattaaacagactctgacaaaggcggactttttatagcagcgacagcacaccacattccagcctgactctagtgtagcatcacatgacaggtggcaggccctgaaagaaatccgagtattttaccccaaaatagatttctttgacatttttcagaatggctctacaggactgtgtcttgtggggaaagtctgcaccctgtagagaatctcctcccttcccaggtcttttccctggtgcaggagggaattaactcggagtctggcaccttgtgaggtctgctgcctgctgcctggaggcctcatctgcttgataaagccttggtctccacagccccttatcttaagccgaggcattcctttctattgattccaagtctttagataataactctttcaaacaaacaactgccagtcagaagatcttcgcatctgctttgacctggaagcccgcccgtcccccgcttagagccgtcccatgtttcctgactgaagcagcatcttgcatgtagggttgatgtcttctgtctccccaagatgcataaacccggcccttgggcacatgctctcagggcttcctggggcggcatcacgggctgttagtcactcttatctggctcagaataaacctcttcaaatattttacagagcttaagtctttttgccaacataatatacccacaagtaagtgcccatgttgtaagtgcacagccagcaggtttttcaaactgaccattcccacggcccttttctcaggcaagaacaaaacactcccgcacccagggtcctcccaggcccctgacagcagccagctctccaccggccctgcatcttccttaagttcccccacacagggaggtccttcctgtgcctggcttcttccacttgctgttgcgcttgtggatttagccatttttttttttttgagacggagtctcgctctgtcgcccaggctggagtgcagtggtgcgatctcagctcactgcagcctccgcctcccaggttccagcgattctcctgcctcagcctcccgggtagctgggattacaggcgcccgccaccacgcccggctaatatttgtattttttagtagagacggggtttcaccatgttggtcaggctggtctccaacccctggcctcaggcgatccgcccgcctcggcctcccgaagtgctgggatgagaggtgtgagccaccgcgtctggccgtattcagccctatttttgtgcattgctgtaaactgttgacttttatgattctattgcgagagcgtgctgcgactctagagttgactctcctgtcggcggcagcgggtagttcactgtcgttggctttgagggtgaaactgctgtagggattccatgtctttgggagcatggtacggccctaagcaggatggtcatcgggagcacgtcccttcagccttgcaagttcctgcaggggctgcagggtcaccagcctccggcatctgtggctcctgggctccctgacctcagcagcatgtggccatgtctgctctcctgctcaccttgtggggggcatgcagagaccctgccacatgctttttacttgcgcttcccgggtgactaataaggcatgcaccttttgtcagggtgggagctcctctgcctgctcactgcttgcgggaggggtctgcagactttttctctagaagagttgcaggccacgcagcccccgtggcaactgctcagcccggctgttgtgctgcagaagcagccaaaggcacgtgggtcagtgagcgtggctgtgtcccagtgaaacaattttcagaaacaggctgcgcaggattggcaggacttggcctgcccctggtctgttgggtcctctgtctttttctcactgattataggagtcctttcgatatgagtcccttatggggtgtgggtatcacagatcctttttgctgctctgtgggtctccttttcaccttttgaggaacagatttttgtttctgtttttttgtcaagatggagtctagctctgtcgcccaggctggagtgcagtggcgccatcttggctgactgcaacctctgcctcccaggctcaagtgattctcctgcctcagcctcccaggtagctgggattacaggcacctgccatggcgcccagctaatttttgtagttttagtagagacagtgtttcaccatcttgcccaggctggtctcgaactcctgaccttgtgatccacccacgttggcctcccaaagtgctgggattacaggcatgagccacagcccctggccagaacagatgtttttaattttgctatagttgagcttatccatttttcttttatgtttattagcacttttgtgtcccacttgataaatctttgcttactacacagtcactatgatgtttacttacgctttcttttaaaagtgttattgttttaccttcatattcagatctgtgatcgctacataatttttttattttgttttgctttgttttgagacagtcttgctgtgtcacccaggctgcagtgcagtggcacaatcttgggtcactgcagtctctgcctcccagattcaagtgattctcttgccttagcctcctgattagctgggactactggcgcccgccaccatgcctggctaatttttttgtatttttggtagagatagggtttcgccatattggccaggttgacctcaaactgccagcctcaagtgatctgccctccttggcctcccaaaatgctgggattacaggcgagtattttctcactagtttttaagcagtataactcttggtggggcatgcctgtaattccagccctttggggggccgaggcaggtggatcatgaggtcaggagtttgagaccagcctggccaacttggtaaaaccccgtctctactaaaaatacaaaaactagctgggcctggtggcacgcacctgtaatcccagctactcgggaggctgaggcaggagaatcgcttgaacccagagaggcagagtttgcagtgagccgagatggcaccactgcatttcagcctgggcgacagagcgagactctatctcaaaaatgaaaacaaaagtataactcttttgggggacacacattttgaacagctcatttgtggctggatctaactgctagctagcgcggctcatcttctgtggaccgtggaaagcacgttgggcgtctgggtgcagaccgtccggttcatacagtctctgccgtgtggcctgggcctcttggtcctcagtgtgacgttgcatgtgggccttctctgttcccgtcaagcatcaggaagaagtgtcctgaggagaggaggagatggggtggtgaggggtgctgagcccctcgtcattgcttctgagggagtagcaggtttcaccatggtggcccggggaggcggggaagggcctgctggccgatggaccagtgtgtgttttcctctcgctgattctcctcccctcagagggcagttttctgtcacagtatctgagcctgttggtaaaacaagcacccaatcataagaaacagaaaataaggtcttcctgtaacgtagcctaattttagatggcggctgtggaagggagccacacctccctgtcactgtgtaggaaggaaggggctgatgcagacaggcagcgccaagttgaagaccctattgggaggccatgaagtggcacaggcctcctggttttggtttctttttttttttttttttgagacggaatctggctctgtcgcccaggctggagtgcagtggcgcgatctcggctcactgccatctccgcctcccaggttcacaccattctcctgtctcagcctcccgagtagctgggactacaggcacccgccaccacccccaggtaattttttgtatttttagtagagacagggtttcaccgtgttagccaggatggtctcgatctcctgatctgcccgcctcggcctcccaaagtgctgggattacaggtgtgagccaccgcccccggccctggtttaagcctgcgtgtttgaggccatgggattcatcctgagctgtcccagcagtggtgcgtggtgggcatttctgcgggtgtgaaattggaactcctcacggctgagcacagtgggtccgggcggagcagagcgcgcggtcctcctgactctgcccccttctcctgggcacgaggagtcgcctcactctgccaggcccctttctttcctggagtggagcagcgccgggcctgcacagaaggttctcccgaggactcctgcgggagggtgggagtggggaccgctagggcacaggagccgctgaaggcacagctgtttcacatggcccccggccgctgtgttttccagaacttggctgtggaggagtcactcccttcagaaggagggtgggtatttggaagccccttcctttccctgtcgcagctgctgttacgttttagcttaaagtagagtttgaacggcgccccccagtggttgtgtgaggacagcagctccctagggaagaggcagaggtgcttgaacccagatgctgctttgtgtcgacctgtgctgtcctgtgtggggctgcggaacttgtgacgtgggagggcacacgagtgaggagtgtgaagaggctggaggttttgaaatgactgcgtgttgggctaagtaaaattttttgttaaaatatattcgggccaggcgtggtggctcacgcctgtaatcccaacactttgggaggccgaggtgggtggatcacgaggtcaggagatcgagaccatcctggctaacacggtgaaaccccgtctctactaaaaatacaaaaaattagccgggcgtggtggcgggcgcctgtagtcccagctactcgggaggtggaggcaggagaatgacgtgaacccgggaggcggagctggcagtgagccgatattgcacgactgcactccagcctgggcgatagagccagactctgtctcaaaaaaaaaggtaaagaaacagatttatttatttattttttttttttgagacagggccttgctctgtcacccaggctggagtgtagtggcatcatcactgctcactgcagccttggcctcccaggctcaagcgatcttcccacttcagcctcccgagtacctgggactacagtcgtgcgcatccatgcctgggtgatttaaaaatgttttttgcagttgaggcctccccctgttgcccaggctggtctcaaactcctgagctcaagccatctgctcgccttggcctcccaaagtgctgggattacatgtgtgagccaccgcatccagcccactttttttttttttttaaacgtggctcccaggactcacgtgtggcttgtagcacaccctatggaaagcaccttccacaccctcagctcgggggtgccctggccttcagtcagaagacatcatttctgttttactttgcaggcctcacccccatggccagtctgtcatcacggtgatcgggggcgaggagcactttgaggactacggtgaaggcagtgaggcggagctgtccccagagaccctatgcaacgggcagctgggctgcagtgaccccgctttcctcacgcccaggtaatgacgccttgttccagcacaccctcctccctcttcttcccgtggttagtagtgggaagtttccctttttggttcgtgcattggtgagagaacttgctttccttgacgtcatgtgattaagtaaaccatattcaaacattttaaatttatacctggatttatgaaagttgggagaagtccctcttctccagccacatccccagatcactctacatttctgaggcttcagcaaaatcctgtggcacagagctgtgtttgcacacttggcttgcgggctcctttgctgtgggccgtggatcacatggtggtctgtgcaggcttttgagggaggcctcatgatcataagtgagtcttcagattcatttccttataaatatctgacatccccaaactggaaagctgtgactctgaataaatagaagcacaacacgcagtgggcgagatgcccactcacaaatgtccagagtcactctagggagtccagagtcctcttggcttggatccgaacatgggggtctgggtacgtacttctgagggctaggggctcccacgtgggagtcagtccctctaggacgctcctgacttcagggagaccctgggctggccgatggggttgttacttcaatcccttctcccctttgctactaggttgtcgtccatctttgccagcagtcaaggccgagcctctttaagcagccacaagagtcttcccttgcctgctgcccgcccgctgttactgaggcccagggaacctgggtggagggcggtgcaggaggggctgagcagctcgtctgcccatagggtccccctccttttgtttcccatgtgccctccttgaagccgcccgtcagccctgggtgtggggaccctgcacggatatcctgtgtgctctggtcccggcgagcgtcctgggagagctgtgcatgagtgaggcatcacagacggtcctcagaggcagtgtgcttgtcttaggcactttcctctcccagcgcgtggtggtgtcaagacaagggccagaggactggggcgtttctaaacttgggtctctgtgcttggtaatcacctcttcctacgtgtttagtttgtccctgtctcctgttcagtgttttcattgttacctgtttgaagtgtaatgtctatgctacattgtatgtttcacttttcacctttctttacttgagcttccaaatggtttcccacagcatgtgggtcccagcgcccgcgatgaggctgcctttgctcctttgccttcgcgtcgcagacgcagcacccctgccagtggcccagaagcccttggaggtgaagtcacagggaggttagctagcaccaccacaaaatctaacactgagtttcgacaggtcggtctttttgggggttttttgagacaggatctcactttattgcccaggctggagtggtgcaatcatggctcactgcagcctccacctccctcagcttcctgagtagctgggactacaggtatgagctactacgccgggctaattttgtattttttgtagagacgggttcaccatgttgcccaggctggtctcaaacgcctgagctcaagcgatccacccaaagtgctggaattagaagcaggagccaccatgcccggctttaacgcacatcttaaaaaatcacaaaactattgtagatttatcattcatgcatagtttttgctagaggtggtttttggagtaatcataaatatagtacagtaagtacaagtttacccggagacatggttcgctatcacattgatgtgtttttggcaaaagagaaagcagtatggttttttaccttcttgttaaagaagggcttttgctttgcaaggaggctctcaggctgcccctgctttcttctgggcacccgacccagaggagcaggtgtgtgcagggccccctgaggctcgagctggtgcctgtcctgggctcctggaggcagctgagggatgtgggctcactgcggtctaaaggcaagagccagaacattgcacagctcattctctctccacgtgcttttgttccacaccatgtcctgtcctgttcccctcggcccctcgtgcggagtcacagatgaccacacgggtcctcatcctctcctgaacggatgcttctgtctctctagcactgaccctcttgccgcaaagctgcacagcatcctcactgatgaggcgtttgagttttactgtagccagtgccacaaacaaatcaaccgccttgaggatctttctgcccgcctgagtgatcttgaaatgaataggtaactgaccagcgcctggccttgctgtctgttcccagggtgtgggggactccggatacccacagcccccttgagggcctgccccgaggcgaccaggagcctctcaggcagcgggactctccctggggccccgcctcccaccctgcacgctgtggggccaccagggccctgcctcctcccctgcatgcgcagcccaggccagtgcttgtcttggtgggaggaagtgatcggtctttgcaagctgtgctgtctgtcctgtgtgtgaaagaggatactttctgcattttactaaaagatttctttcattgagctcatgagacagaattgggaaagttaaagatttagtctttaagaacagatatgtaaacagctttcaggattgtcagtttaaatggagttttgaatactcacagtgagcgtgtgagggagctcactgtgtctcagcaggggagctcttgtggctggccctcatgtctaactcccagttacagaagacggttttgagtgctttgcacatattgacgtgcccgttgggcatcgtgttgatttcgcttgcggtgaagcccctgggtgggcagctctccagaagggtctggtgaagaaacgggccactttggagctttccacagcagccctagcctagcagaagaggtgagtgagcatacaggctcatgctggcaatctgggacggcttcctgaagaacgggacctggcctgtggggagggtttgtaaaggtggcagaaaggtgagttatcctgacggttctagcatgtttagaggtatctgtgaaactgcttacctgtcttgagcctgccctgtccctgccccagggggcttctgccgaggcacatccttgctggcgggcgctcactgcccacggccttattgaggcttctgtcctgcctctagttccatttccagggcacttaactcttcttatgttctgtgaaatgctgtgaagcacagggcccccagccagtgcccattcaggtggagaggatgggggtggggcccggcactgatggccattctggagcatcgggggtcttggcagcactggtgagaaagcagaagtgctctttgaagagggtcttcccgggagacccgaggccgcccagagccctccccgggagacccgaggccgcccagggccctccccgggagacccgaggccgcccagggcccttcccggggagacccgaggccgcccagggccctcccgggagacccgaggccgcccagggccctcccgggagacccgaggccgtccagaatcttggattccaaagatccgctaacctctgttttaggggaaatcagtttctgcctgcgtgtgtgttcagctaggggttcaaggcccggcgacgatggctcagcctgcttggggaggggccatttgttcttcccacgcagagacttgccctcccactcaccgataagttgagtgcaagcatgtcatctccgtacatgaaagtaagcctgaagactcaggtctcgtctctcattttctgaagatttttgacatagaactgattttttcccacattgagaactagctccaagatggccatggtcgcctctgctgggctttgtgggggcagagaagggactaggatgtagctaagtacaactagcaagtcctgtggagcctcacgtccaggttctgctaccccttttcctaagactctatgaagcgggccaggcgcagtgactcacgcctgtaatctcagcattttgggaggctgaggaggcaggcagatcacttgaggccaggagtttgagaccagcctggccaacatggcgaaaccctgtctctactaaaaacataaaaattagccaggcatggtggcacatgcctgtagttccagctacttgggaggctgagatgggaggttcacttgaacccaggaggtggaggctgtggtgagccaacatcctgccactgcactccagcctgggcaacagagccaaactctgactccaaaaaaaaaaaaaaaaaaaagactctaccaagtggttaatatgctattcaattcaacacaatcaggacacacaactgccagtcagaacatcctccccataacccttagtggaggagatctgaatcttgcgttttagtttccatggacttgcctgaaagtaagcttatttggtcatgctttgtgggtggcaacaggtgacttagtccagaccacctctggaagctttgatgtcagatacgatgtccagtcgcctcagaacaggccaatagctgttgcattttccaggtaccctgcagcctctaaatacatttcattttgtaggaactaagaagtgtgccttacctggaggtatattttcttttttcttttttttgagacagagtctcgctttgtgacccaggccggagtgcagtggtgcgatctcggctcactgcaacctctgcctcccgggttcactccattctcctgcctcagcctcccgagtagctgggactacaggcgcccatcaccacacctggctaacttttgtatttttagtagacacggggtttcaccatgtctcaatctccggacctcgtgatccgcccgccttgaccccccaaagtgctgggattacaggctgagccactgcacccagcctgcctggaggtatattatctttttcttttttgagacagagtctcgatctgtcacccaggctggagtgcggtggtgcgatctcggctcactgcaacctctgcctcccgggttcactccattctcctgcctcagcctcccgagtagctgggactacaggcgcccatcaccacacctggctaacttttgtatttttagtagacacagggtttcaccatgtctcaatctccggacctcgtgatccgcccgcctcggcctcccaaagtgctgggattacaggtgtgagccaccgcacctggccacctggaggtgtattttcaattataaatcctgttgctgggctgccagtccaggccctgaaaggtcagtaggtaaactgaacgatgagtctgtcctgtcctattagttctagggagtctcaacaataataagataaaattaaatttgtattaaggctgggtgcggtggctcatgcccgtaatcccagcactttgcgaggctgaggtgggcagatcacgaggtcaggagatcgagaccatcctggctaacacggtgaaaccccatctctactaaaaatataaaaaattagccgggcgtggtggcgggcgcctgtagtcccagctactcgggaggctgaggccggagaatggcgtgaacccgggaggtggaacttgcagtgagccgagatcatgccactgcactccagcctgggtgacacagtgagactccatcttaaaaaaaaaaacctgtattaaaatatacattattagtctccagtcgagaaaggagagccacacagtaatttgaacagggacagtttaatactacaaagaatgggctgagtgtgggctgaaatcgcagtgctttgggaggctgaggtgggaggatcacatgagccggggaggtcgaggctgcagaggtgggaggatcacatgagcctgggaggtcgaggctgcagaggtgggaggatcacatgagccggggaggtcgaggctgcagaggtgggaggatcacatgagccggggaggtcgaggctgctgaggtgggaggatcacatgagccggggaggtcgaggctgctgaggtgggaggatcacatgagccggggaggtcgaggctgcagaggtgggaggatcacatgagccggggaggtcgaggctgcagcgagctgtggttgcaccactgcacttcagcctgggccacagagtcataccttgcctctaagaaaagataatgcaaacaaacaaacaaaaaatttaaaaaatcattagggaaaggaaaagaatgtcacaggctatgggagtaatgaggcactggttgggatgagtaaaaagaactctgcagagtgtagggacagcaggcacaggagcagccgccacccagggccggggcagagccccccagctacagtcactgccacccagggctgaggtctgcaccagctgcaaacggcgtggtggggacaccaccgtgctgtcagggcttgtggggaacctgcctcctggctgccaggaaagctattctgttgcaggacacttggcagaggcacccctagagaacagctacccgaatggggtcggggaagcccctggctctggctacagtgggcaggatgctccctggagtaggtactggggagactgcaggtgtcggagggccctgcagagagtggtcagaaccaggaggcaaacctcttcctgctgtgttcactcctcggctccctctgctgatgacacgcagcattgtggaggaagagcctgctaagggcccagctctgtttctacagggcaagtaaaaaggatggacttagagctgaggggctctacgttaatacctggcacagcagctgattctcctccagtagatttctttttttctttgagacagagtttcactctttgttgcccaggctggagtgcagtggcgtgatctcggctgactgcaacctctgcctcccgggttcaagcgagtctcctgtcccagcctcccgagtagctgggattacaggcatgcgccaccattcccggttatttttgaatttttagtagagacagggtttctccacgttggccaggctggtctcgaactcccgacctctggagatccacccgcctcagcctcccaaagtgctcagattgtaggcatgagccaccacgcccggcccctccagtagacttttctgcctgaccctggaaagaaaatcagaggtgtttttgagacaggtaagctgaagagagacgtggctttgtgagttccaggaccgtgatggttcccaggccccaggggtgagggtgtcttcctgcaggctgaggctaatagttcagcagctagactgtaaaatacaactttggacctcagaaatgagggagaaggtaagtttggcccatgtgccactgcagatggttaaatcagacagctgatgtataattggctatatttactgccctgaaatggcaacgggaaaggtttccaaactgatgcctaggcaggcgttctgagcatgatgcatcagtgcctgagtcgaagccagcggcaaactctcctgtcacagcggggcctgggtcacttttcacttgggggcctccgaaggccaagcgtttgggggtaatttggcttcagaagcattgggacagtgcagccagcgggtgggaccaggtgtggcgctggcctctcagtcgtggtctggggtggctgcatctggaagcctctttgggggctggagtaacgagacgtatgcggcctcaccccagcactgccgtgtccttgctgttttgctgagtgagcatttgtgcatggacttgcctggggggccctgcatgccgggagcattgctgaaaggccgcccacctcgtatctccacagcctgagtttcctgcttcctcctgctcctctctgtctgttctaacaattttcctgtttattttgttttctgcacagtccgacaaagcggctctccagcaagaaggtggcaaggtaggtgggtctctggttcctgctgaaaaacgttctgaagtggataattaatcatagttttttaaaaaacattttaaaatgttcttttccaaggtattttttaaactcttgcaagttactttacatggtttggggctgaaggtatcctgaaggagtgttgggaaaggggtttccagggctgtgaatttggacctggatttgtgaccagggagggtacgtgtcagagcttttggtgctgggcctcttgtgtgttcactaaggtctggaaggggccgccatccccagatgtctgctctatgttagctctgaggtagcgagacccagtgaggagcctggcttctcagagccgggtctgggcagctccccaaggtgagtcgaaggtgagggatgggtctgactccaattcctaaagaccatttcttcattttccagcttcgtatagatctgttggcttcctgctgtgaaagatggcaacatacacttttatcttcctcccctgccagttcttaccgaaataaacatgcagggttaaggcccttcccagggagccactcagtgtggctgccgggtggcctctgctgccgtcagagtctgcctttgtgtctttatctgctttgccttcctagtccccgtcctgcttcgtggcccggcatctggcagggctgggagacgcctctccagcttcctctggagcatcccctctggagcctcctctctgccctgttgtgccgggcgttctccaggcctcgtggctgtggtcctggacaggtctccccacactggtgggttcctttgtttcgggggttggatcctctagctccctggccccgtcttccttctcatttgttttctctggtttttgtccagcgtatcttcctgtagcttcttgagaaaagaggtgctcaggagataaacttgagcttgggttggtttgtactgtgagagtgggatcattttcctgtaagatttttgacggcattgcttatcttctagagctaaagttgttaccatgaagtttaacctttctgactcggtttctttgggaccagcctgagcaacttagtgaaaccctgtctctacaaaaaaaaaaaaaaaattaaaaattaaaaattaaaaaaaaaaaaggaaaataggcaaggtctagctgcgttgcccaggctgtagtgcagtgagtggcaattcataggtgcaagcatagctcacaacagccccagactccctgggcttaagtaatctttccacctcagcctcccaaaattctcggattacagaggtaagccaccacacccagccaagaacagaaaccttttgttttccattttcttttattttgagacattgtcttgctctgtcacctgggctgaagtaccgtggtgcaatcacagctcactgcagcctggacctctcaggctcactccatcctcccacctcctcctcctgaggacctgggactacaggtgcgcattgccaatgcctggctagtcttttaatttttaatagagatggagtttcactacgttgcccagactgatcttgagctcctgggctgaagggatcctcccaccttggcctcccaaagtactgggatcacaggcatgagccgtcacacctggccatggatgaaaacttttttctttttgtttctcttctcttttcttggctttcttttctttttgagacagtcttgctctgtcttgctctgtgaagtgacatcatcacagctctcaatagttttcacttcccagacctcccaagctcaaatgatcctccctcctcagcctcccgagcagctgagaccacaggcgcatgccaccatacccagatgattttttaattttttgtagagacaggcccagactggtcttgaactcctgggctctagcagtcctcccacctcggtctcccagaatgttggaattacaggcaggagccaccgcgtcccacttgttttccattttctgtcattttaggggctaggggctaggggctagaggaagcagaggtgaacgtcatcatgcatctttttctaactgtcttcttgctcacccctttcagaaaagcattgagctggccgggcgtagtaggtcacgcctgtaatcccagcactttgggaggctgaggtgggtggatcacctgaggttgggagttcaagaccagcctggccaaaatggagaaaccccatctctactaaaaaaatacaagattagccaggtgtgttagcaggtgcctgtaatcccagctactcaggagactgaggcaggagaatcacctgaaccctggaggcggagcttggagtgagccgagattgtgccattgtactccagcctgggcaacaagagcgagactccatctcaaaaaaagaaagaaaaagagaagcattgagctcttaggaacgtgacgtgcatccccagctacacttctgttaccacttcagcatcaccttcctccccgcttcatcaagtcttttactccagacaggctgcagctggtgacatgaaagaccggtcaaggccagctaaggcatctgcttgaggcctcccgtgcctaggatggggcgcagcctgcagttggctgtcacagccttgtgtcagaaacaccctttaaaatttaatgtttccttcacgggtaccctttggcataaaaaaagcccaatctgagccggacgcagtggctcacgcctgtaatcccagcacattgggaagccaaggtgggtggatcacgaggtcaggagttcaagaacagcctgaccaacatggtgaaaccccgtctctactaaaaatacaaaaattagttaggcatggtggcacacatgcctgtaatcccagctactcaggagcctgaggtaggagaactgcttgaacccagaaggcagaggttacagtgagcccagatcacgccactgcactctagcctgggcgacagagcaagactgtctcaaaaaaaaaaaaaaaaaaaaaagctccatctgcagttatctgtcgttagagtttacaaaacagagacctcttctgcagtgtgtctatccacatgtaaatatatgtacacaagatttaatctgttgttttgccccaaatctgccacaagaggctaaggaagagcaaaataaacgtcgcgattcgcttctcacagttctcagcccttcgcgctgaactattgctgagatggtgggttttgccagcagccattgtagcccccgggcctggctgcattgctcacctccctcagccttgttctgtccctgtccatgagatggaagtggctttctccagtcagctgtgtgtgcagagaccgggggctccgggcagagccgagtccatcaggactggaggaagtgctcacagcaggcaggctccctgggccctgggtgggaggcctcagggatccccgtacctccttgctcaccagccaggctcgacctactgccctgtggggcaggtcaggctttttccacagctccctctctgggaggagggtccttccaagtgagggtgtggtgtagctggagaatccctctttctaggggatttaaataagcagccccagccggacgcggtggttcacgcctgtactcccagcactttggggggccgaggcgcacagatcacgaggtcaggagtttgagaccagcctggccaacatagtgaaaccccatctctactaaaaaaaacaatacaaaaagttagctgggcatggtggcaggtgcctgtaatcccagctacctgggaggctgaggcaggagaatggcttgaacccggaaggcagaggttgcagtgagctgagattgcaccactgcactccagcccaggtgacagtgcaagactctgtcgcaaaaaaaaaaaaaaaaaaaaaaaaaaaaattaaataagtaaataaataagcagccgcatgacccatgctgaggaccctctgcctcacgttggtggccacgtgtggtggctgcacgctgggtgcctggggatggctgtgtccccgagtcagccccagaagtgcctacgcctctaggacagctcagaagtgctgacaggtcgtggcctctcaggatgggctctgggttgcagcttcatgcctggagtggctcatgtttgggggcaaggtcatgggcgtttaagagcagcgactggccaagaacatgatctgtatcagcagcagcttttgagaatctgatgaaatccccagagccccagaagggcaccggtgtgttccagctggtgcacgttcacagggcttgtctcctcagagcgtttatggggaaaaagatggaaatgttcaagcccagtccgtactgagaagcaaatcgaacttcatacacttggtagacattttcagtggaaaaatattaacattttatggaattcttactctgctacgtccctagccaagctgtttgtatgcatgaccttggttaaacctcagttgcctctagacccccatttcataggcaaggaagctgggagagggtccccccatttcataggcaaggaaactcggagagggtccccccatttcataggcaaggaagctcggagagggtctcccatttcataggcaaggaagctgggagagggtccccccatttcataggcaaggaagctcggagaggatccccccatttcataggcaaggaagctgggagagggtccccccatttcataggcaaggaagctcggagagggtcccccatttcacaggcaaggaagctgggagagggtcccccatttcataggcaaggaagctgggagagggtccccccatttcacaggcaaggaagctgggagagggtccccccatttcacagacaagttcagagaggctccccccatttcataggcagggaagctgggagagggtccccccatttcacagacaagttcggagaaggtcccccatttcataggcaaggaagctgggagagggtccccccatttcacaggcaaggaagttcagagagggtccccccatttcacagacaaggaagttcggagaggatcccccatttcataggcaaggaagctgggagatggtccccccattttataggcaaggagtctgggagagtgtccccccatttcataggcaaggaggctgggagagggtccccccatttcataggcaaggaggctgggagagggtccccccatttcataggcaaggaagctcggagagggccagtgctttttaacggtcacgcagttctgagcatcaggctgtcagcctggagcctggcttggtactgaggttcccaggatgtataaagaactgaacacgcacctttgctgttggctcttctgtgcgagtgctctgagagttttctgtactcccggcaagtttgggttggtacagattcaccacagcgaatctgaccacgtggtgaccacaagcacgcgcttactgcgcgcctaagttcacactccctggagaagctcctgccccaaggccgcagcctatgggcctttgcgtctactcaggaccatgaggctgtgtccccgagcctggcccgggtagtaactggcatggcctgcggtgctgggggcgtgtccacaggagctggtgccacagaggacacgtgtgtctgctgtcttcctggactcggtcggaccagtttcccagtgtgtccgtgagggtgacactgagtgagacttctgggatccacacctttcctgggaccctcactcttcctgccacagaaagcacctgtgaaagtctgagatcaagaatgtgcacaggggaggtgtctgcaggtcaaggtcctgagctgatgtctcacaggcctctggtagagacgagattgttcgtgtctctgcgaagaagggcatgttttattgcagccaagtacaaagtcctctctgccactcgctggctgggactgaggtcatgttctgtcaggttccaaagagcgccaggaagactctgagaccacagagcacggcctgctttctcccagcccctggtaaagatgtccagcctgggacctccccctgtatatagtgctttaagtgggagaagaccaccacccagatcaggggaggacctgtcccctgcaatgctgctgcctgcttttcagattgacttgggagtgcttgtgctgacggagcatgtcctgtggtttttccctttcttccctctgttgttgtgccttttctgtaggtacctgcaccagtcaggggccctgaccatggaggccctggaggacccttcccccgagctcatggagggcccagaggaggacattgctgacaaggtaggccctggagggctgggtaggtggcaagtaggggatttagaacacagccacgcctaagggccgctgcagacaccccgggaggtggggacagcacagccggaggtgaccccatgtcctccagggctccccagactgtccatccagccccgatgctctttggcaggtttccccaaggggtctcgtggccatgtgagaaaaaggagtcttcctgttgtgcacgaagggccagctgggaggagtggactgggcagtgagtgagcaccctcgggtatcccacccccactgtgtctgagtcgggctgggggacacccagacattcagtccaccaggcccatggagacgcgacctggggcacccatgatttgggagaaaagggctggccctgcagttactgcagagccaacagcctgaggaacgggcttctcctggggccttgaatggaatgggtgacagcagccagggcaaggcagccttgccgtggtcaagacccgcttttcagccagatgtggtggctcacgcctggaatcccagcacattaggaggcctaggcgggcagatcacttgaggtcaggagtttgagatcagcctggccaacatagtgaaaacccgtctctactaaaaatacaaaagttagccacgcatggtggcgggcaactgtaatcccagctatttgggaggctgaggcaggagaatcacttgaacctgggaggtggaggttgcagtgagccgagattgcacgactgcactccagcctgggcgacagagggagactccgtctcaccttctgcaccccctcaccttctgtgaccccttcacttactcctgtaccccctcaattcctcctgtacccctcatctcctcctgtaccccctcaccacctcctgtaccccctcaccacctcctgtaccccctcactacctcctgtaccccctcactacctcctgtaccccctcacctcctcctgtaccccctcacctccttgtgtaccccctcacctcctgtaccccctcacctcctcctgtacccccccacctcctcctgtaccccctcacctcctcttgcactcccatctcctcctgtaccccctcacctccttgtgcaccccctcacctcctgtaccccctcacctcctcctgtaccccctcacctcctcctgtaccccctcacctcctcctgtacccccctcacctcctcctgtaccccctcacctcctcctgcactcccatctcctcctgtacccccttacctccttgtgcacccctcacctcctgtaccccctcacctcctcctgtacccccctcacctcttcctgcactcccatctcctcctgtaccccctcacctccttgtgcacccctcacctcctgtaccccctcacctcctcctgtacccccctcacctcttcctgtaccccctcacctcctcctgcactcccatctcctcctgtaccccctcacctccttgtgcacccctcacctcctgtaccccctcacctcctcctgtacccccctcacctcttcctgtacccttcacttcctcctgtaccccctcacctcctcctgcaccccccttacctcctgtaccccctcacctcctcctgtaccgcctcacctcctcctataccccctcacctcctcctataccccctcacctcttcctgcaccctcctcacctcctcctgcacccccatctcctcctgtacccccctcacctcctgtaccccctcatctcctgtacccccttacctcctcctgcacccctcacctcctgtaccccctcacctcctcctgctcccccacctcctcctatacccccatctcctcctgtactctctcacctcctcctgtacctcctcacctcctcctgtacttcacctcctcttgcatccccaccacctcctccctacaacttctctagcatctcaagtctgctgacccaggccaagtcctcctctgctcccttcactccttctcctacctccgcaggtgtctgattctcatcttggtgtgaactctctgagggagggaccgagacatggatctgtctgtcccttgcatccatgggcacctgggctgcctctgtgagctgcatctggctgagcagagacccaactgtgtgttggggggctgagtcttgctgcccaccagccagccagtccaaaggcacccctgggccccgagccctcagagctgcggcactgtgtgcatttgtgggtcgaatgacagtgctccccaagaccccggccccattaggagctgcacctttgtgggtttatgggacaagttggatccaacaccagcctagctaggtggatctgattctgtgctgagaaaatccccaggcggcctcccaggttgttcccttgggggtgcaggcccttctgcttctggctgcctgaccctgaagcctggtctcattgccaaggttgtcttcctggaaaggcgtgtgctggagctggaaaaggacacggcagccaccggtgagcaacacagccgcctgaggcaggagaacctgcagctggtgcacaggtgagcctgggccaggagacccgggcctctgcgtggcgcctcctgtgcccgcctgtcagcccccatttacttctctttacctcacacagcaggggcttggccacccgtccatccccgttggaagccggctgagggggtggtgccaggtggtcatctgagcctacccagtgggctgcaggcaggcgacccgaggctctgactggtgctctcatggaaccctagacacacagagggccagaggagggcactgcctccctctcgggagcgctgagacctgacccacacagaggaggaactgactgcgaacccacgcagtgctcagcctcaccagcaggcctggaggtgcagctctcccaccactctggtccatacggggtttgcccgtcctggaagaatgcaggttagagaagtcgctcagcagcagaaagcgaaatgagcagtgactgctgagtacgcgacaggacgcgcagtctcatcgctgtgggcaggagtgctggggaggaagcgaagtgtgacgccgtgtttgcagagaaagagtgggagctgcttgcctcactctggtttgcagacttttcttagaataccgtgtaattctcggtgtttttcacacgaggcacgccatgttgtctcatagccgatttgcaggactgtttccggtgcaaagtaagatgagcttgtcccaggagtcagctacccaggctatgacacctgtagctgggcaccggcagcctcttgtgggcagaggaggcagccaggaggcctatgaggcacctgtgggatctgcagaagaggttcttcctgtgagcttctgtccctgcccagctgcgcgggcacatcccggctcttccacatattctcagctcggccaagggccctgtcccttgaagcttcagtgtcttcatcaccactgagcaggtagattcagggctctgagcagcctgcacacacgtgtgttggcagcagggcatttgtggtcagcatccccaaagcccccaagccctcaccctcacggtactaacatttgtgaccatctgccctgtgagcgctgagaattggaatgcctcatgggattgtgggcataacttgcacatcattttaattctaacaaagcaaagcatgtgctcttgtggagtgaagaccctgggcttggcggctgcccgttctccaggattctcagcagaagagggcctgctaccagcccctgctgcagagtggagaggggccaggcatgctggtgaaggggctggactcccgtagtgcgctacacataagcagtgccaccaaagaccactgtctcctccttgtcaaggagaatccggggggctgccagatgcacttgttttgttttgttttttgagagacagggcctcgctctgttgctcaggctgagtgctgactacagcctccacctcccaggctcaagcgacccgcctccctcagccttcgatgtagctgggactacaggtgtgcaccaccacacccagcttttttttttttttttttgagacggggtctctctctgtctccaggctggagtgcagtggcgcaatcttggctcaccgcaacctccgcatcccaggttcaagcgattcttctgcctcagcctcctgagtagctgggacttgcaggcatgcaccaccacgctgggctaatttttgtatttttagtagagacggggtttcaccatattgaccaggctggtcttgaactcctgaccttgtgatctgcctgcctcagcctcccaaaatgctgggattacaggcgtgagccaccgtgcccggcctagtttttaatttttttatagagatgaggtcttgccatgttgcccatgctggtctcaaacgcctggcctcaagcgatcctcccaccttggccccccaaagtgctgaaatcagaggcgtgagccaccatgtccagcctagatgcctttgtcgagttgactgtggaggtttcatttgagtctggagtatgttcatctgttttccgtgtgtgtggtgtgaagtccacactgccgcctggcaccacccactgaccgtctgcagtgcagccccggccacattcagttcctgtggctgttccctgtggtgctcacctccaacgtcctaaacaacacgtttcccgttttcagtatcatctgcccgttctgagccatttgctctctagccctaccatacagctgccatcctaagagtacgtttcccgttttcagtatcatctgcccgttctgagccatttgctctctagccctaccatacagctgccatcctaagagtacgtttcccgttttcagtatcatctgcccgttctgagccatttgctctctagctgtgccgtacagctgccatcctaggaattccgagtgctttctcctgtgtttgattccttattttctgggtcccacgttttcttctgttttgccaactcattttctgagtatgtcactgatagttgcctggaaaagggagcacaggagccagatgctctgagaactgcttgtgtggaagtgctttttcctcccaccctgctccagtccatagtgtagctgggcataaaattctaggtcagagatcgaattccctgagaatgtgaagacctctgacccggtgctgtgactgaggaacctctggtgccgcagggccttgatgttctctgtaacttctgtttcccaccctacatacttggaggaggatcttgtattatttgccgtgctgtgcacctggttttcagcctttatttcgttttgttttgttttgttttgttttttgagacagagccttgctgtgtcacccaggctggagtgcaatggcacaatctccgctcacggcaacctccgcctcccgggttcaagtgattctcctgcctcagcctcccaagtagctgggattacaggcatgcgccactgtgcccggctgatttttgtatttttagtagagacggggtttcaccatgttggccaggccggtgttgaactcctgacctcaagtgatccatctgcctcggcctcccaaagtgctgggattacaggcatgagccaccgcgcctggcctaggttttcagcctttaaatctggaaaacgcgtcctttcgctgtgggaagacttctgaagttatttcaccatgcggcctctccctctcatctgtctgaacatctgctagtcacacagtgggccttctggatgtttcctctccttttttaaactttcctcgtctctaattttatctttctgttctttttttctatgtaatattctcagttttctccttcaactcttgatcagatcttttttttttttttgagacagagtctcactctgttgcccaggctgtagtgcagtggtgtgatctctgctcagtgcaacctctgcctcctgggttcaaatgattctcgtgcttcagcctcccgagtagctgggactacaggcacctgccaccacatccggctaatttttgtatttttagtagattcagggtttcaccatattggtcaggctggtctcgaactcctgatctcaggtgatctgcccgcctctgcctcccagagtgctgggattacaggcgtgagcccggcatctcaatcggacttttaaattgtccttcccacgctttcagttcctgggagctgttccttgttgtttgtctcttctgcagcaggctgccctgacgctgcagctttggctctctgctcgcggaggccgctggctcggggacctttccctgctgtctgctgcatcatgtgtctccctgggtcctcacttggtgtttgctttggccacttcctgttgaaagctttcctgttgtgtctggtgatctttggccatctgttcactcctgcgtgtgaggcaccacaaggatgagaggctctgtgcgaggcagggccagagggcgtgggctgtgctgtgtcagtgggcagggcctgtgcccttctctttgggatggttcagtcctgtctcctgcggatggttgtgaagatctcaggaaggccagggtctccctgccctgtgggaatattccctttcccctgtggtctagctgacacctgccctgcctctgctctgaggtgacctggatgggactggtctctatacccacttccccagcctggaggggactgggagcagagtgggccccccccccacttgtggcccctcacagcctctggggcccggatgtgcccagctgccagagccagactcgtcctggctcccatgtggacctggcatctcaggaagcctcgtgagcacctttgggtgatgtgccatgaactgactgtactgcagctgaaggcagactccgccagcacactcagttctctggtgttcagctgccgcggaccacgtgctcatcagacactcacttcctggaaatgctgtggcccttgggccctggcacctccacgccccgtcccgaggccccgtgcctctgggctctgagcgcacgcgttgtgtgtagtggccctggcacctccacgccccgtcccgagtccccgtgcctctgggctctgagcgcactcgttgtgtgtagtggccctggcacctccacgccccgtcccgagtccccgtgcctctgggctctgagcgcacgcgttgtgtgtagtggccctggcacctccacgccccgtcccgaggctccgtgcctctgggctctgagcgcacgcgttgtgtgtagtggctgcaggtggagcagctgcatgaacacagagtgcaccaggagaagttacctggcgggctcaggccctctgagtgctgcggtccacaggccacaagcgggcagtgcctgtgggtatcagctgggcctaggtgcagtggacactgctccggccaccccaggtgcctttagtgtgggaggcgaggccatctgggggtgtattcgctgcttcagaactgccttgaccagagctcggggatgcccttctcggtgccctactcccgagtggaggcaggttctctggaggtcctgaggcagcttctgggcatgggtggagccactgcacaccctgcctggagacagctcagctcctccctttgcctttcaagagcaaacgccctggaggagcagctgaaggagcaggagctgagagcctgcgagatggtcctggaagagacccggcgtcagaaggagctcctgtgcaagatggagagggagaagagcattgagatcgagaacctgcagaccaggtaggcggttcccaacagcccatccaccccagaacctgcaggccaggtaggagacggtccccaacagcccgccagccccagaaactgcaggccaggtaggcgaggttcccgacagcccgccaaccccagaacctgcaggccaggtaggagaagttccccgaaagtccgccaaccccagaacctgcaggccaggtaggagaagttccccgaaagtccgccaaccccagaacctgccggccaggtaggagaagttccccgacggcccgccaaccccagaacctgcaggccaggtaggagaagttccccgacggcccgccaaccccagaacctgcaggccaggtaggagaagttccccgacggcccgccaaccccagaacctgcaggccaggtaggagaggttcccgacggcccgcccaccccagaaactgcaggccaggcaggagaggttcccgacagcctgcccaccccagaaactgcaggccaggtaggagaggttcttgacagcccgcccaccccagaaactgcaggccaggcaggagaggttcctgacggcccgcccaccccagaaactgcaggccaggtaggagaggttcccgacagcccgccaaccccagaacctgcaggccaggtaggagaagttccccgacagtccgccaaccccagaacctgccggctaggtaggagaagttccccgacggcccgccaaccccagaacctgcaggccaggtaggagaagttccccgacggcccgccaaccccagaacctgcaggccaggtaggagaagttccccgacggcccgccaaccccagaacctgcaggccaggtaggagaggttcccgacggcccgcccaccccagaaactgcaggccaggcaggagaggttcccgacagcccgcccaccccagaaactgcaggccaggtaggagaggttcttgacagaccgcccaccccagaaactgcaggccaggcaggagaggttcctgacggcccgcccaccccagaaactgcaggccaggtaggagaggttcctgacggcccgccaaccccagaacctgcaggccaggtaggagtagttccctgatggcccgcccaccccagaacctgcaggccaggtaggagaagttccccgacggcccgcccaccccagaacctgcaggccaggtaggagaggttcctgacagcccacccaccccagaaactgcaggccaggcaggagaggttccgacagcccgcccaccccagaaccggcagtggctaggaataacctgaaagtttagaaaaaggggcaaagctatgtggagaagactttgaaactctcccaaagaccacaagggatcggttcaaagactgaccctgacgctgtgcgggtgctggtttctgtaaatccatgtctaaccaacgtatccagtctttttaaaataccaatcttttttttttgggtgggggtgggtgggtttgagatggagtcttgctctgtcgcccaggctggagtgcagtggcgcgatctcggctcactgcaagctctgcctcccgggttcacgccattctcccgcctcagcctcccgagtagctgggactacaggtgcctgccaccacgcccggctaattttttgtaattttagtagagacggggtttcaccgtgttagccaggatggtcttgatctcctgacctcgtgatccacctgcctcggcctcccaaagtgctggggttacaggcatgagccatcgcgcccggccttttttttttttttttttttttgagaccaagtgtcaccctgtcgcccaggctagagtgcagtggggcgatcttggctcaccacaacctctgtctcctgcgttcaagcaattctgttgcctcagcctccctggtagctggggctagaggctcacaccactgcacccagctattttttgtatttttagcagagacgggtttcaccatgttggccaggatagtcttgaactcctgacctcaggtaatccacccgcctcagcctcccaaagtgctgggattagaggtgtgagccactgcacccagccaaaaaatcattattttaaatagagacaggggttcttgctgtgtggcccaggctggtcttgaactcctgggctcaagcattcctcccacctcggcctcccaaagcgctgggattaccagcgtgagccactgtgcccgccgaggcacaagcattaaagcagcatggtgcctcccttggttctccatctgggagctcatgctgtggattcctggtgtgtgtttagaaatacatttgcaagggacggttattgattttctgtaaaagttaaaagcatcaggtaacttaaaatatctataatcagaggactctagagttctctatccttcttgtgtgtctgggtagtgagggtggaggaagttgttttatacagttgtttgtttgtttgtttgtctgttttgagatggggtcttgctctgtgcccctggctggagtgcagtggccctgtcatggctcactgcagccttgaactcccgggctcaagcaatcctcctgcctcagcccctgagttgctggggctccaagtgtgctctatcatacctggctaacttttcttttttggtagagacgaggtcttgctgtgttgcccaggctggtcttgagctcttagctttaagtgattctcccaccttggcctctttttgttgttgttgttgggattttttgttgttgttgtttttcctctccatactctcagcagaagcacctcagcctcttaaagtgctgggattatgggcatgagccacctcacgtggcttttttaaactgagcatgtactacttttagattttgaaatacagtagttttaaatattcataagaggatttcaggttcttttgcttgtgttccttccagctcttaaagctaagatacttgccttatctaagaagagctcctaggcattttcaaaactggtggcaggaaggggcctgcactgagagagctgtgcgggacgccccacacagggaggcctccgtgcctgccattgcagtggggcgccgtcttctggggagcaaggtcagggcagccaggacagtgttttccccgggccttggcacagtgcagttgagtgggctcaaaattaaagtacgtttctcgtctgtgagcgccagggagcacctcccatgggacctttccgctggggctgaggttggggcacagccgtgtggacatcctgccgcctctgtgtgctctggtgtggaggggcacaagataggggtctcacgaggccctcagggagcaagcagggcccagtgtcactgcctcttgtgagcaagccgcctgcccaccctaagcgcttggggtcagtgccaccgtgttctgggcctcctgcagcttcctggagtggccaccaggaaccttgtggttctcagggctgctcaggccgtcagaggcccctgcagccccaggtcagcaacctgcggtcagcccagcacgaggcctctggcatcttggggacttccccagcctggcctctgcccatctggtgtacaggaagaccctggtcagtgcaaagacactgtctcagtccggggtcctcaggagcagaggatctggaggcaggactcccagcacctgcgtcggaacctcctgggaacagcaggggcgggtggctatgcagttgcagtgcctagaaaacagctggatttcaggagtggagcctcagtagagatgagagttaaagctgaaagggcatagagaagatggaggagtggagaggctggagctttggacatccttgtttagggaccgggaaaggagaatatgtgtcatcagcagaatggggctgtacgaaggtcacaggcagagatctgaatctcaggacacagggcccgggagaggttctaggaaaggccaggtacctctgggagtggggcccccaggggcttccagaaagtatgggagcccctggcaggctgcagagagctggagtgaaggctgatggggccacagtggcatgtccacagagaccggggcctgatttgcagcttgtggcacctgccgaacccccggcgttggggtacatggcccatcatcaggcacagagtgaactgggtgaacgtggccctggtgtgtggtgctttctagcagcacgtgagccaaggaagcccagggaagccttcgcttgtgccacgtagcatagctcgtccttccagaaaatgtgagtagactcccctgagcctgataatgaaaggagagaagtcagaaagactgaccccagcactgggcagagccgagtgtgtctgatggacagcgagaggctggggcaaggaggaaagaaagaggggtcaggcctcgggaaggcagtgctgctgtgtgtgaagctgtgcggctctttattttcttctctttgcttatctgtagttttgaaattcaatagaattaaaacataatttgctttcataattatgaacaaaacatgcaagtgttactttgaaaggagaaaatagctgtgggtagagccgtctggactccagggttagaggcggagagtggaacttagtatgctccactcagcaaaacaacaggaaaggcagatggcaaaggtgcagcccagaaagcacagctgcacacactcctaacgcaaacaacaccctgcgccagcagctacaccggtgtttgcatctcggagcagccacatggctgacacggaccggggttcgcatctcggagcagccacacgggcgacacgcaccggtgtttgcatcttggagcagccacacgggcgacacggaccggtgtttgcatctcggagcagccacacggctgacacggaccggggttcgcatctcggagcagccacacgggcgacacacaccggtgtttgcatctcggagcagccacacgggcgacacgcaccggtgtttgcatctcggagcagccacacggccgacacgtgttggggtttgcatctcggaacagccacacggccgacacggaccggggtttgcatcttggtacatgaaggctcagaagtgggtagcaccaggaaccgtggaagttggataaaggcgaggctcacacaggagggtccccacccacatacagctggatcacacccatccccaccctagaggaggaatcgggactgcagggcgccagcacacaccagagtggcaccaccgagcgcccgggtcctcctgacgaacacctgaggccaggggtctgaccagccccagacaagtcctgggagcgtgcctgtcccgggcaccccgtggcctccccggcagtgcagaggccggccggtgctctttggaaggggttgcatctgctttgcccctggtctcaatcatcagtttgcaaagcaagagcaagtcccctcctgggtagaggacaccttaagcccttcccgcccagccctgtgctgcccctgggtttccacttacaccaaattctgggtgttggtgcaggttggattgaattagaagggacggcagggtaacgggatggtgaggacaactggattatggagaagatccagggttccttggagaaatggccagttctgaggctgggacaggctaagcctgcagcaatgtgtagtatctgaaaatgaggtgcttacactaaaaaccccccatgagcacagacactgaggttatctcagagggacatgggccagctgaaggagttgccagacgccaaagctggaacagtttaacaaactcatagtgacagccttggattacaatccaaagcataaagtgcgtgagtccatatgacacagataaattatcatcaacgaacagaaaagagggccgggcgcggtggctcacgcctgtaaccccagcactttgggaggccgaggcaggtggatcatctgaggtcaggagttccagaccagcctggccaacatggtgaaaccctgtctctactgaaaatacaaaaattagccaggcgcggtggcggccgcccgtaatcccagctattcgggaggctgaggcaggagaatcacttgaacctgggaggcagaggttgcactccagcttgggcgacaagagcaaaactccatctcaaaaataaaataaaataaataaatagagaagacacaaatcttcctcacagaggaattccacataatgtccgcagacactccctccaggaggcgggggctggacccagtgagcggcttccagaggacagagcgggcgggaaagcagggacctgtcagagtgcacacctggcaggcagaccttggccaggtgatcagaaagccgtgcggacgtcaggaccctgatacggtgtgacgggaagggccccgcacctctgtgggcatcttcccaaaacccatcacccagtctaattgcgagaaaacaccagacggacccaacgtgggggacgctctacagacaccatgacaggcctgctcgacaccgtcaaggtcggaaaacacaggaaagtctgggagactcacagaccaggggacggaggagacaaaatgcagtgtgggctgggcacggtggctcacacctgtaatcccagctctttgggaggctgaggctgttggaacctttaagctcagagttggagaccagctcaggcaacacagcaagaccttgtctctgcaaaaaatttaaaaattagccacgtgtggtggggcacacgtgtactcccagctacttgggaggctgaggcaggaggatctcctgagcccgggaggtcggggctgcagtgagctgagattccaccagtgcactctgggtaacagagcgagaccctctctcaaaaaaccaaacaaatgcagtgtggttgctggatggggtcccagaacagaaagggcacgcatgggaaagccacagtcttcagttagtgtggtctgcagagtgtcccaatgtggctctgtgactgtgacacataacaccacagtgaagaacagtgaccacaccaagggaggccagtgcagggcccacggggactacactgtgtctgctacttctttttttctttttgatacaggatcttggccgggcgcggtggctcacgcctgtaatcccagcactttgggaggccgaggcaggtggatcaccaggtcaggaaattgagaccatcctggctaacacagtgaaaccccgtctctactaaaaatagaaaaaattagccgggtgtggtggcagtcgcctgtagtcccagctactcgggaggctgaggcaggagaatggcgtgaacccggaaggcgaagcttgcagtgagccgagatggtgccactgcactccagcctgggcaacagagtgagactgtctcaaaataagtaaataaatagatacaggatcttgctttgtcactaggctggagcgcagtggcgggatcacagctcactgcagccttgtacttccaggatcaagtgatcctcctacctcagcccctcaagtagctggagctacaggcatgtgccactatgctcggctaatttttgtatttttttatagagatgggggtctcactatattgcccaggctggtctcaaactcctgggcccaagcaatcctcccgcattggcctcccaaagtgttgggattacaggcgtaagccactgtactcgccttcaacttttctgtaaacctaaaattattccaaaacccaaagtatattaaaaaaaccaccgtggatggccggcggggtggctcgcgcctgtaatcacagcactttgggaggctgaggcaagcggatcatgaggtcaggagttcgagaccagcctggccaacatggcgaaaccccctctctactgaaattacaaaaattagccgggcgtggtggcaggcgcctgtaatcccagctactcaggaggctgaggcaggagaatcgcttgaaccccgggagatggagcttgcagtgagctgagatcacaccactgcactccagcctggtgacagagtgcgactctgcctcaagaaaaaaataaaaaaataatactaaaaccttcaaggattacggaaaagctgtgccctggagcacatgggtgggcacataaggattggccctggtcgtttgggggcgtctgttggtcacagggcggccccagcagggtttccctgagacacagggcacactggccctgtagaggcgagcttcctggagtgagtttcagctttgttcttgtgtcccaggctacagcaactggacgaggagaacagtgaactccggtcctgcacgccctgtctgaaggccaacattgagcgtctggaggaggtgagctgccaacagcctggagctgtggccagtggggccagcccatgccctgcctgtggggcagctgaggtagccctgagctctgtgctgagcgggatactgtgctgtgtgtgagggaacggggccagctcagggcccaggccgctggaagacactggaccgtgctccacccacaggagcagggcccagaggctcactcctagatggacccagggctctgaatctgggaattgtcctccaaggggaaggcatcagccagccacttatgccccaaccactgccgacgtggaggcagaggctacacatggggctcccacaccccagcttgtcactgcgagacctccctgcccccacctcaccaggtgtgctctgggaagctcccaggaaggatattctcagagcacttgggccctgactcccatgaaccagaggagcccggctggaggtgcccacagccactgagtcaggtcctgtccacacaaaggtccttcctgcccctcgtgagaaacggccctcgtggcctgcgtgtgcgcctctacccagaagcaggtggccttgacctccactgagaggcaggaaggctcagacccagccctgtcgcgctccaagcacgggcgccaccgcgttgctgttgggagactcagagattggagggacagacggccggggcaagctgcatgcacaggtaggtgcgtgacccgcatccagggcaggtgtccacccctgcaggagaagcagaagctgttggatgagatagagtcgctgacgctgcggctcagtgaagagcaggagaacaagaggagaatgggggacaggctgagtcacgagaggcaccagttccagagggacaaggaggccacccaggaggtgagcacccaccctgccccacgcccagtcctgcgcccagcctgccccacggggagcctttgtttcctgagacgctagctcttggctgtgctgctttgggcatagccgctggtgtgtgtcgtcctcccgagagacggccagatcaaccctgaggttctacagccaagtgatggctgacggtggcccctgggagcccaggccccccggctcactgcacggttgccctgcagctgatcgaggacctccgaaagcagctggagcacctgcagctcctcaagctggaggccgagcagcggcggggccgcagcagcagcatgggcctgcaggagtaccacagccgcgcccgggagagcgagctggagcaggaggtccgcaggctgaagcaggtgggcaggcctgggcctccctccctcacactcctgcagaagcttccacaagactggttgggaagggggggccgtggagggtcagcatctgagctggaggcctttttccccgggcagtccttgtccctgctcagccaccagcaggggccacagcccagtagtgatgttgctgtgccttcaggacaaccgcaacctgaaggagcagaacgaggagctgaacgggcagatcattaccctcagcatccagggcgccaagagcctcttctccacagccttctctgagtccctggctgcagagatcagctccgtctcccgagatgaggtaacacatcccgtgtctgcacggtgtggcctggggtccacagtctgcactgtctgtgcgctgtggtttatgcgctgtggcctgtggcccatgcgcctcagctctgaccacctgcttgccctacagctcatggaggcgattcagaagcaggaggagatcaacttccgcctgcaggactacatcgacaggatcatcgtggccatcatggagaccaacccgtccatcctggaggtcaagtagaggcaggaaggtccagcctgagctggattcgggactccaacaccctggagtggttccgtcagaccatgaggagccaagaccagcaggtcccacagccgacagtgcccagagcatgcagggaaccctcgtgcagctgagctggggccgccaaagaccggggctgccaaaggggcagagggtggtggagaggagagggagaaagggaagtcccagggcccggggtccacagaggatgagggttgtggcagggccgtccatcagcgctgaccttccgggggcccagagcttcccagccctgagtcaagctggccatgaacgcgtacacttcagttcagcaggatgggctggagagcctctctgtgcagcggtgtggggtgagccctgctgtggcctccttgtggtggtccctcttcccacgtgcagccctgttgggaagaaaggaagaaaacaggtccctccaggggtgctgctgcctaagccacccacataagtacgctggtgccgtgtcacccatgttgagccgctcctgatggctgacgggctcccagaccctcacctcggacatggtggtgggggaaggacgggtgggcaaggctggtgcgttccccagctctccctacgctgctcgggccattgcccagccagatgtggtcacctcagtccagctctggggcctccaggccatgtggctgttcccacggcccagtcctcgctgcagtaacccctgggggctctgaccacctatgggggccgggcaggagcctctggggcctccactccgacatcaggacctgagatgaccgctgtgtggcgctctctccctgggcagggtggatgccacaggcccctctggctcccaggtgctgcttctccacaggtgcggcctggcccggcctcctaaaggccacaccctccccacgcacttcccaggccagaatccaaacatcgggaaccctgttttcttctgggtgtgtctcacttagaaatcgtggttcttccccgagggtgcatgttgcaggagggagagggcagggaagactcacagcagagcaggagggggcctgtgcttctcggggtctgcaccccaggcacagcggtgtcaccccgcaggaccgcgggcctgccccaacccccagcattcccgggtgggcccagaccccatcaccaagactggccacccgctgcgtgtgtgtgcgcgcgcgtgtacgtgtggccccacatccgccgccttccacgctaggatgtaagaggtcgcctcctattgtacatttggggaaagccttgggtgtaaatcagtgtaaacttggaggagagatttttctatcatgtagagtaggtattttttatagattgaaggttgatcaattttttaatactttcaagagaaaactgtgtatacacatgaaatatatatatatatatatatatatatatgtataatatataaagactggcaccctgcctctctgtgcccaggcccagccctggtgacatggcaccactcagcagtgctgtcactgtaagcatggactcccaggagacagtgtgggaaacgctcctgctttaattccccgagaaacggctcttcctgcctggatgcaggagggcaggggccaccacagattaaagctgttactgcacacgcagaggccggcttcttcctccaggggggccacagggtggggtgggagtcttctgggcctggcccagcttccctcaaggcgtccgaggccatcagttgtctgagctcagaacccagcagacctgcctggctctgcagcttggtcagactaagacccttccaaggccgtaggattgcacctccaggcccagtggagcctggcagctttccagccaggttctggatcctgacgagctgctgagacagcatcaaggtggggcaggtggggcggggcaaattgggcagcacagggctgtgtgggcatcagggctctgggtcacacgcctctggggacgtacgtcccatgtcgggagagccgtcaaaacgtccccgggattaagagaagagtggggggcagggcgcagaggctcacgccataatctcagcactttgggaggccaaggcaggaggatcgcttgaacccgggagttcaagaccagcctgggcaacatagcaaggccccatctctaaaaaataaaaaattaaccaggcattgtggtgcgcacctatagtcccagttccttgggaggctgaggtgggagaattgcttgagtccaggagacggaggttacagtgagctgtgatcacaccgctgcactccagcctgggcgacagcgagaccccatttcagaaagaatttaaaagggcagtgatgtgcagggtggtgggaggacatcccccagaagagggggcagacacagtaccagcaccacaggcacgggaaggtgaggaggcaggtcccgacggaagtgggctcccgaggtcatgggcagccagggagtctgagagagctcagtgccactgcagccacaaagaatggcctgcggggagtggtcccatctgatcaagagtcccccaaaaacacaagccttgaaaactggaccacctggtccagcatccaggaagcggactgtgcatctgcggctctcgctctcccgccccccgcgcgagatgcccgcctgcctgtcactctcagatgcagatggagatggagaaaccaaggcccagggaagctgaggacccaggtctgccagtcccctcagcccagctgctgcttgcgggctggtgaccagaagaggaccaggcgtggcctacagtgaggagtccttgaaccctcagtgcaggtgcagcagaatggttccaggtcacagggcccaagaaccctgattgcttcatgagttagaactgaggagtgacaggccgggcgcggtggctcacgcctgtaatcccagcactttgggaggcccaggcaggcggatcacaaggtcaggaaatcgagaccatcctggctaacatggtgaaaccacgtctctactaaaaatacaaaaaaattagccgggcgtggtggccggcacctgtagtcccagctacttgggaggctgaggcatgagaatggcgtgaacctgggaggtggagcttgcagtgagcagcgatcacgccaccgcactccagcctgggcaa

SEQ ID NO: 495 - DNA, 838893 bp, Homo sapiens
  source 1..838893: mol_type = genomic DNA
atgcccataattaccacatccattgtccttttttgtcaaaaagcttcactccagttagaagatacctgaaggcagaaactgcggctttgtcaactgttgatttcctcatggcgcgcagtgtaaatttactagtactttatttagtagaggcttagtacttactggttggcagatttattaatagttcctgtacatctcaggaaatcaacagatgatttatgttattctaaccctaactttattaaatataataaaaactttcagcatttattgtcaggcccagggctaggtaggctcctgagatacagaagttaataagggaagcagcccagaaggtaggggaaacaaaaaaatagttacaacactcttgatatgtctcagcatctatagacattaacatcaggaaaagcgggggtgtggggggaaggaatttgtcagggagggccctttggacaaatgtcacgtttctcagagtagcttttaaatatgggtgggaaaatgagggcaggggaattgaagtgggatagaagggagatatttaaactaaagtcattctatggctgcaatcactggacactatattcacttatccatgcaatcacattcattgagtgcttcctatgagttaggcagggtgcacagtgtaagatacaaatgaatgatacaggttcacagcggttgtctagtgggataaaatgctgcacagggcaacctggataagcctgacatgttaggtgccacaaaactacagaacaaagtgctaaggagattcggaaaatttacaggtcatttctggttgcaggatctagaagaaggatgtccacaattcaaggatcagtacaatcttcgtagcgaaaaagcgttggtttattctacctctacctagtttgtacctcaacatcttttaccccaaaggataaaaaggtgcaaatgagggcacattttcttcatataatacgtaatggtgcttacttattgctttcctgttcattccccgcaggtgatttccctcttcagtctcccccgagtctcacagaaggaactaacaagggagcgcttcacaagcacacagacaccttcaaacaggcgcagaagagtacttggtgaaaaagtattctttcaggtgactttccttaagattactgagcattaagaatgaaaatatgtaaaccaggtttacgagcaagaaaataatctctccacattcagagttaatcttccgaactcagcaactgccagtagaacgcaccccggtcagggcgggctcgcgggcgcggtcccacccccaggcccctccgccgcggaggttctccagcgccgcccgtactcccgcctttcgcgcgtccctgctctaacagctctggttctgtcaggacctcactcctccgctcccggcgcaaccgcggccacgcagcgacgtgcacgcgcgtgtgcgccgccgccgcccggcagagtgggcgcctccgacatcaggagcgcgcacgccgcgcagaggggcctggacgagcgcgcttccgacccgccgccaccgcctcctcccctccttctcggcccgccccctccctcgcctcttcctgccaggcggcccttctcccctcccctctcagttccctccgccctcctcgggctccagcggtggcggagcgaacgggaccggcccggcttcagagcgcgaggtggagggtggaacgcgggcgcctgaaggagttgttgtctcggcagcgcccgcggagacgtgaagaggtgaggcgaggacggcctcctagggacacgagggcggcccggcggcccggatccgcgggccgaggctgcctgggtgtgttggcgtcgggctgagcctggggagggtcgagatggggccccagccgaggactgggatgcgggaggaccgcggtaaggagggtagggggcgggttcaggactgtcggccgcctcccggacaccgcagttctcccaggtggccgctcctcgcggatagggcgggcggggtcggcgcccttacctgggggtggggtagtggctttggcggccgcctcctccagctgtgccctcctgacattgctgcctcggcggctgccgcccgctgctacgctgtggctgctgctggattcgcagtcccagccgccctgcgtccggtgggcgagtggttagggtattttcttacccacacgcaggcttctgtactcgaccatttctctccctcgcccttcctcttcctccgccgagcactttgctcggctcctgctgttgatgcttgtggttttgcagtttgggatgggatgcgttccgggcagatccctacctgtagggaatgccccgcttcaaagttgacctcctgagccatgacaaacacctccccccaacccccacccaccttgtgagtgctcagtgtcctgataactgagtcaaagtttctgagactgggctagtactttgcactggtcgccaacggtacagggctgggcagtgcgtcagcatgtggaaaggggccaccggctagcgggaggtggccgggtgcatgggagctgaactgacgggtttcagatactaggcagtgtgtccaggtccttggatctctcagatagggttatattagaatatgtaccaaaacttgggtggtcacttgcaaaattggtttcatgcaagtaaactgaaatgccagccttattacactaatggtaaggagaacttttgcttgcctgacagatttcagcgcagtttggaaaatgattttaaggcctttatttttggcactggaggggtttagggatttttaatacatttaaatttcctcgtgcatagtgggaggtaagtagttgcttgttaaaattctgaaaacacagtttcatgaaaaccttctgacttttcttacagtagtgtttatatttggcatcttccgtagaatatccattagttatgatgtcagaagatacggatgtgaagtttgctttttgtgatcacattggaagtggattttgttcatggaaaatactggttcacaagctcctagtactagaaaactggcctgtgattcattttctcagtagagcgtcccttatgaaattgacaatgagatttctaaggagaaagactagttgaactttatgtatacattatcatcaaattgtattaaatgtacacctgcctgaggggttagctctagactttgagttagactggtgtctatactaaatcagttcaataaatgcgctgatattatgtattattcatttggagagaagtagataaagcagggcagagtttatattttaacatattatgtagcctacatttgctctgatgtgtattattattattattattattattattattattatttttgagacgaagtttcgctcttgatgcccaggctggagtgcaacagcgcgatctcggctcaccacaacctccgcctcccgggttcaagcgattctcctgcctcagctttttgtgtagctgggactacaggcatgcgccgccacgcctggctaattttgtatttttagtacagactgggtttctccatgttggtcaggctggtggaactgctgacctcaggtgatctgcccgcctcagcctcccaaagtgctgggattacaggcgttagccacagcgcccggcctctgatgtgtactagtaagtcatatggggagaagtagatgaaatagggtagagcttatatgtgaacatattatataacctacattgtcctctagaaagctggaaacaagttagtaagtctcagtactattggggcatatggtgaatatacaaaccaacctaaaaaagtgtgactgtaaatagatgaagtttgtttgtttcttttaaagagacaaggtctcgctctggcgcccaggctggagtgcagtggctcagtcctagctcactgcagccacgaagttctggtctcaagagatcctcccacctcagcctcctgagtagctgggaccacaggcacatgccaccaaacctggctaattttttgttttatttttgtagagtcaagggtctcaccatgttgctcaggctagtctccaactcctggcctcaggcagtccttgcgcctcagcctctcgaagtgctgggattacaggcctgagccaacggtgcttgtcccattttttttttttttcacctgagttatttgatgggaatttctatatattacagttgcgatgttctgagaatttttgtttctttgataattgtttcatgatttagatgttttctttttacgctggtagttatgatttttttttcctttgaatgaaagaattttattaggcatgtgaaacaggagttttcatgtgatcagctctccagttctaaatttgtgacttttaaaaaacttgaatttttttctttgccttaacccaaacttgaatttgctcagccattgtatatttatttgaactctcagatgatacagcattgaagcagaaagtccttttatccatgcttttggagtaatcaaaagaaggaattctgttgtgccaagtaaaaatatgtgtgggagatagctaggcttcaagagattgactttgaagagagtagtggctaagtagcaaaaatttcctatattgaaggtgtagaagtgggcctgcattccaacctaccattgtcttcaagtggggtatggatcattatgactggttagagggggtttggagaatgaagttgttgctgtaagcctatgggattcccaggcacagagcttgcttatgtcttaattttaatgagttctatatttttataactcttgacttatataaatgggtcagccgttgagtctgaggatgaccagcagcccaaggctattccaggtgctggtatttctttttttttttttttctctttctgttttttttttttttttttttttttttaattatactttaagttttagggtacatgtgcacattgtgcaggttagttacatatgtatacatgtgccatgctgggaattgaacaatgagatcacatggacacaggaaggggaatatcacactctggggactgtggtggggaggggggaggggggagggatagcattgggagatatacctaatgctagatgatgagttagtgggtgcagcgcaccaggtgctggtatttcaaagatggctcaggggtttcttgtggagatgatctgatgagcattttgccattacaaacagtggaggcggagaaagtacggacttgagcctgagttatggtaaaacatactcatttttaaaggagagttttaatgctgatattatagagaaagacattgtttgactcctagactttcagaacgggaaataattttgactttatagtcagtatttgaattgggtataagtatgtgaacatcagtggaccctaataaggaagagttaatgaattaagaagagcttgcatctctgaacatcttctttttatacttcgtttacttcccatattgctcttattcaacagatgggatggcataattgggtatacgaagtttatgcgcatgctaactcttttttgttatcttttggtgttttttggtgtactttttggggattttcctgggaaagttctaggcatatattcagttgatttagagttagatttgggctaagattattagtatacttgaaattctgagccttcttattttctaaatagcttttaaagtagaaaacatttgccagtgctgttgggcttaaaaaaaaaaaaaacccaacaacaacacaattctttataaatactcatgaaaaatctggttacaggctgtgttgtgatagacatagtacagccaaaaatatatttaagaaaattctcacccagtttagtaagcttaaataagaggaaaataagacagtttttttttttaataaaaggctgattttcccagaatatgaagcctaacaactgtttgctgtgttattttccctgttgcctgttctaaattcagcaagaactatgcatccctagtccatggtaaaagcttagttccagtaggtgattcttagtaatggaagtctcattgagggatgcaagggaatttgattgggaaacatcaggcatggaacatttactttttactgctctaattttctgtgtatctgggtattcagtggggtgggaacatgagcacaaatactagaattatctggattttttttttatactatggatttcctcctcttaccccctacctgccccccaacccattgctaagtgagccattgatagtaggagtgtgttatatccttcaggtatgtagggctgaacaaatgctaaaaaccttggcacttggctgatattccataaaccaaattcctgctctgtgtaatttgccttctggtgatatcagtttgttactcccatttttgaagaaaaatatgaattgtggtgaagagacatctgtaaccaagagtaagatttatcaaattatgtagtatacatgaaggacaccaggagattgtttacctgaacatttattaaactcatttgactgtgacccacaataaaaaatacattttactacttgattccgcaagcgcacacacacacaaagttgaaagtttggtgaaataatatttatcttttcagggccctactgagttagctataatggcttgcaagaccagttgtgcatatttcttcctatctagctctttgtccagtgacatcatgttggtagctcaaaattggtcatggtgggaatatttacaccaggaaattcagcaaatggtattcttagggcttccctcctcataggtagttgttaaacatttatagcaccccactgcttataacacacattgatatattctgttatttcatttcattttaaaaatgctgggttttgacttccaaattaattttacacccagctaatggattatagcctacatttaacaacaaatacaactagtttagcctaccctcttaactttgtaagtgaaggaacatactaagagcctcaaggccaaggtcagatagtgagttattagcaaagccagggctctggactcaatctggagttgtttctggtgggcttctttcctaacctcacttagtgtgtataagggattgtgttaatcagtttgaataaagatggaccttgaccctgaggactttatgcttaggtgggggattaaatatggaaacaacagtgataatgaaaggcagaaagtaatgggtggtaaaaagataaagataaggaactataagagtttagagaggagggagagattacttttatttttgtttgtttgtttgtttttcgtttttgacccaggctggagtacagtggtacaatctcggctcactgcaacctctgcctcccaggttcaagtgattctcctgcgtcagcctccctgagtagctgggattacaggcgccaactgccacaccaggctaatttttgtatttttagtacagacggggtttcgccatgttggcccggctggttttgaacttctgacctcaggtgatccatccgcctcagcctcccaaagtgctgggattacaggcgtgagccaccgtgcccggtctacttttagttttaaggataaaagaagaggtgacatttgaactacttttttttttttttttaatttggagacagcatctcactcccgttactcaaactgagtgctgtggtgccatcacagctcactgcatccttgatttcctggcctctaacagttcttctgcctcagcccccaagtggctgggactatataggcacacaccaacatgcttggctaatttttcattacttgtagagacggggtctcattatgttgcccaggctgttcttgaacttctggactgaaactgtcctcctgcctcggcctcccaaagtgctgggattacagttgtgagccaccacgcccggcccctgaactatgctttgaagaatgggtaggatttggacatgtggaaataggacaactagtatgagagaaaggcctttctgggccaggggccagggtgatcaaaggcatacaagcatagacagggaaaaatgagtagtgaaagagctaggcaagaaagagtccgttagcaccagatggttaagagcctagaatgccagttttcctttctgcttttcagtttatctttcatttttgactctggagtaatctagtacttcttaacattgaacaggatttatatgttatgattaaaatatgatccagagagcacataagtatccttagagtagaagctgaagggaaaaattattagtgttagagaagcaaccttgagtttaccaatcctaaaagtgttggaaagtgaaaaatattttatttgtaaggagagacagtgttttttttttgtttgttttttgtttttcttcattagcgtcaaattggctgtagtagaacaggaagcagttttgaaagtctttacaagggccttctaaaatgtgatttctaaatgactggatcttaatttttggaggcaggtttagttcaggcagaagggtagtttatacagatctgcagctaagctgagtagcttttagaatttagggcagcaaagcagggtattttatacaaaatccacttgtaaggaattgatggcttctttattccaagaattttcttagatttcagcatttatgtctttgacagcctgtatgactgaagatgttttgaagtcttggatggaacttgccttgtttcacaggggaattgggtagctagaaatgaaggtataaatgccagtaagttgtgtctgttaatcaagttgaagtactggtggcagttctcaagcttttctgtctgctgatgatttcacacttactgcttctaattaaatagtgtgtagtcgatttgaagaagccttgcttctctttgacccaccagttctgtaaaggtaaaagccttcttagagtgttgcccaggtaacaacacatacagagactgcttaatagctcatcatggaagtgtgtggaaaattttggaaatgttggtaaagaagttgctatagtaaataactacttggttggtaaaaagctgggctacttctggatagttgataaagagtttttgagatgagccgtggttctaaaataaatatgaattgtgtcattgccacacgattttcttcagttatgtaagctcctaatatgtaaatgttgtcctaccattttagaaggtgtcagcagtttcatgtgacctgttccacaatatagcacaccccaaacaccacgataagagttcaaatatggcatggcccagatgcctcacaccagttaaatgataaagctaatcatgtcagcacagtgtttctgttaaagttttttccccctcttttttgaggcatgttagttttcacgaattgaggttattagaatctttccagattttctgccaccattttttttgtgtgtgtggtaaaaagtataatgatggtgcccttaattaaattatgtaaacatttgtaaagatatacacgcatacacatagtgtgcatatatgtatgtgtagacatacatacatatatatttacatatcattagttcttggaatttgtggtgaaaatacacccacctggcaaatggttgaaaacaagtgttctagctctttgaagactaccatgtgagtattcacaaatatgaaagtaatgcaaacccaaagggagtttttgtatgcccaatttcaagaaaggagcacattttaaaaggcaagtatggaattcattcatataccagtgaggaatttctcaacttctcctttaccccacacatacacccgtttaccattctcattattagcagtaagcaaaattagaagactttaagaatcagacttctactacaagtgatgcaaataaatattatttttagaaaaaatacaaacctgtggttttgagttatgaaggtttaagagacacatatcactagttttttttataaactacatggagtgttttctgtgcttcaagatgtcgtaattgtcattgtgaggccttttgctgagagcattgtataaaggaatagttgttagaatggttattaggtgtttctttgaatagtttatttttctgtagtcaatttatcttgcatacattgatggccgggggtggtggcccacacctgtaatcccagcactttaggaggccaaggcaggcagatcacttgaggctaggagtttgagcctagcctggccaagatggtgaaaccccacctctgctaaaaatacaaaaattagccgaatgtggtggtgtgtgcctgtagtcccagctacttgggaggctgaggcacaagaatcccttgaacctgggagatggaggttgcagtgagccaagatcgtgccactgcactccagcctgagctacagagtgagactcggtctcaaaaaaaaaaaaaaaaaaaaaaaaaattgaatagagtatactactttagtgaaaaattgaccattgaaaaatcaaccattgaagggaggttatatatatattggcagacagtagggtttctgaagttgttttagaataattttgttattgagcagctgttttatcaccagacctcattcatttattattgcttttttccatttttttttaaatctcatgaactgtattctttcattttaaatctctcatatttgccctgaagtcagtggtcatatttggactaatgttttgatttgctgttgtctgcgcaaagatctattaccaagttgcatgatcaagttggtattgaatggtaattcagttaatgtcttcttctctccattccttttttccttctgtattctagaagttaccttaacactagtgtgagattcctggcaaagttaatggggaaatgaaattaaatattactgttattcaaatcctagggtgacctttttgccaacactaatgaacatagaaaatttttcagcatgaattatgcagcttaaattttcactgaggctaggcctcttaagtttaaaaaattaaaagttaaaaaaatatttatggggtacaagtgcagatttcttacatgtatagattcttacatgtatagatgtggtgaagtctgggcttttagtatacccatcacctgaatatccaccattctgtatgtccatgtgtacccattgtttagctgtcacatataagtgagaacatgcggcatttgactttctgtttctgagttattttacatatgataatgtaggcctcttaagttaaaaaacattctgacatgcattttatagttcttgtcaacattatcaatagctttgatagatgaaacaggtttctcctgttgcagttggtatcacacacaataaattagccatccctaccatttgaaaatataaaggtgttttttttttttgacacggagtcttgctctgtcgcccaggctggagtgcagtggcatgatcttggctcactgcagcctctgacctctgcctcccaggttcaagcaattctcctgcctcagcctcctgagtagctgggaccacaggcacgtgccatcatgtctggttaattgttgtatttttagtagtattttcactatgttggccaggctggtctcaaactcctgaactcgtgatctgccagccttggcctcccaaagtgctgggattacaggcgtgagtgactgtgcctggcccagataaagtttttttaaaagataatctagtaatagtaggaaagagaaaccagtttatcagttaatctaatacttcctattttgaatataaatttcattgtgttgcatggtaacttcattatgttccactgagtatttacttttctaaagacagacctttaacaatttttcctttttttcatgttttggagacagggtatctctctgttgcccaggctggagtgcagtggcacggtcatagctcattgcagcctcaaacttctggtctcaaagcgattctccaaccttcgtctcaggagtagctggtgggactataggactgtacccaccacactctgctaattttttaaatgggagtctccctatgttgcccaggcaggtctcagactcctgggtttaagcaatcctcctgcctcagcccttccaagcattggaattacagatgtgagccactaaaccctgcacaatttttcaacttttgggaatttcacttagaggaggataatagtagcttttagacatttttatcagttatccaagggtggaaaaaaatacttaaaatgcaagtaactacaaacatttttggttttgtgggagacagtgtagatagaacatagaaccttaattcttgatctagtgctgctgtgaaattcagagagaataagtaatttagacacaacttctttctcctctttgcacattaaccatgagctaatattgagtgtttacatggggtagttattacataagaaaatgtacattatctcgctaatcttcacagtaaccatatgaggtaggaacgattataatatcatctccagtttgcaggtgaggaagcaggattagagaacttcagtaacttacctaagatcacatagccaggcgccgtggctcatgcctgtaatcccagcactttggaagtccgaggcgggcagatcacgaggtcaggagattgagaccatcctggccacatggtgaaaccccatctctactaaaaatacaaaaattaaccaggcgtggtggcatgtgcctgtaatcccagctgctcgggaggctgaggtaggagaatcgcttgaaccagggaggctgaggttgcagtgagccgagattgcgccactgcactccagcctggacagagtgagacgctgtttcaaaaaaaaaaaaaaaaaaaaaaatcacgtagcttgtgagaggcagttatctcttgcttctaaatctgtctcacagtgactctctactactactctgtattgacaatctttaaatgggatggtacttgttttgcacatttcataggatagttatgagaatcaaaaaagataagatgtacaaaagaacacacagatgtctctggtgtattcattttattggataatatttgagacaccaaagaaatctttgaaatcttgtacacatatttgtttgtaatcagtaatgctataaaataagttgaacagatgaatatttgaaaagttatctataaagacatattttgtgtgggttcaagggatctgtgagtgaaaggtagaggaatgcagaaatgtagggatgtattataaaaagtggatcagatgatctctagcagcctgaattctttctgcaatgaggagtatatgtaaataacaggtgacctataagatccttccaacatcaataatctatgagtctttgttatgggttacttattttctgttagaatatcctcaaattagcgagatatgcccaaaagagctttttaattttattttagcttagatcatcaataatcaccattctttctttgtccatttctaaaattgtttatatttaaggtatacagcatgttttgctatacatatacaaaacatatacagatacaaaatcatgaaatgatttttatgttttgatacacagatacaaaatcatgaaatgattactacagttaagcaaattaacctatccatctccttctataatttttaaaattgtggtataagcatctaaaatctgtcttagcaaattttatatatactatacaatatgaataattatagacttcgcgctatacattagctctctagacttattcatcctacataactgcgagtttgtaccctttgacctacttattcccatttcgtccccctcctttcccctggtaactgtggctatactcttgtttctgcgtattcagctttaaaaaaaaaaaaaaaaaaggatttcgctgggtgtggtggctcacgcctgtaatcccagcactttgggaggccgaggcaggcagatcacgaggtcaggagttcgagaccagcctgaccaaaatggtgaaaacccgtctctactaaaaatacaaaaattagccaggcatggtggcatgtgcctgtaatcccagctatttaggaggctgaggcagcagaatcgttttaacccgggaggcggaggttgcagtgagctgagattacaccactgcactccagcctgggcgacagagtgagactccatctaaataaataaataaataaaaagtaaaaaaaaggatttcatatataaatgagatcatgtagtgtctttctttttgtgtctggcttatttcatttaacatagtgtcctccaggttcatctatgttgtttcaaatgacagtatctcctttttttttttttaaggctgaataatattcccttgtgtgtgtgtgtgtgtgtgtgtgtgtgtgtgtgtgtgtgtatatatgccacaaattctttatctgttcatcttaggacagacacttaggttgtttccataatctaggctattgtgaataatgctgcaatgaatatgtgaaagcatatatctctatgaggtgctgatttcagtttctttgggtgtatacccagcagagggattgctggatcataggcagttctatttttaatgttttgaggaacttctataccattttccgtaatgtctgtgtagcaatttacattttcaacaacagtgtacaagggtttccttttctccacactttggccaacacttttgtctttttgataatagccatccaaacaggtgtgaggtgatagctcattgtggtttcgatttgcttttccctgataattagtgatgttttcagtgctttttcatatacctgttggccctttgtatgtcttctttggaaaaatgtctctttaggttctttgcccattttttaattgggttatttcgttttgttttgttttttgctgttgagttgtgagagttccttatgtattttggatattaaccctttaccagatacatagtttgcaaatattttctcccagtccataggctgccttttcattttgttgtttgttttggagaagctttttagtttgatgtagtcctacttatttatttttgcttttgttgtttgagcttttggtgtagtatccaccaatatcattgccaaggccgaacaatatcagggagcttttcccttgtgttttcttctaggggttttaaggttttattatagatattagtgtttacttctttaagctattttagcaaacattctttaaatgtcagttgcacttagattgaatataaatatataattatctgagtaagatgcagctatggtgttttgctttttcccctccaagttaaaaagattttttttttttttttaagatggagtctcactcttgttgcccaggctggagtgcaatggcatggtctcggttcaccgtaacctctgcctcccaggttccagtgattctcctgcctcagcctcccgagtagctgggattacaggcgtgcaccaccatgcccggctagttttgtatttttagtagagatggcgtttctccatgttggtcaggctggtctcaaactcccaacctcaggtaatctgcccacctcagcctcccaaagtgctgggattacaggcgtgagccacagcacccggctgttaaaaagattttttagaggatggggtgggtgaagtggcttactattacattattacatacttggttcttaatgcatttcttatgacttcctctcaaatttggatttcctgagtgtgcattttgagaagaaacttaatatcattatatatatgaaaggtcattttaattttatgtagtaagtttatggctttttatacagttggtttcattctctgtcgtttttttttcaacaagtatttatttataaggtagaatatgggttttgtgctggagaagcagagatgagagattgttgaagagctgacagtcttattggggaaacagatgaatagagagtggcaaggaaggggcaccacaaggtgtgtcttcagaaggatatgtaaactgatctgggtttcaagtaaggctgtctggaatatctgagttgagtttatagaaagcaagagggatattttagatataggtatgaaactttgaaatagtaagtctttacctatctagactcagtggcagtacctcatctctctgaaacattacaaaagcccccaaatagttgtcagtttaataagaaattctttataaataaagctctttaggctgtcgctgagagcttatttttactttatatatgatacttaaggtttctaaggttgtagtagattaaggaggaataatttacaagcagcaagatgctgcaataaacatactgataacaagacagatttctgacaacatgatagcaatgaagaaattggaaaaaaaatacacacacacacacacacacacacacacacacacacacaactgaataagtcatagataatacaaggaaaacatccttggacaactaaattagctttaagggtatcaaatgtatttgtaatactatagaataataatgaaagtttgctgtgctctctgttaccaagaagacatgaaatatatgtcctgtatagtatatatattagttaggattcttcagagaaacagaaccaataggatagctatgtgtagatacagatctgttggaattggcttacacaattatggaggctgagaaatcccgtgataggccgtctgcaaactagggaactagggaaaccagtagctcatttcaagtccaaaggcctgagaaccagcagagccaacattgtattaggttggtgcaaaagtgattgaggtttttgcaaaataactctcaattcgaggctgaaggctgaaaaactagggggctgctgatgcaagtcctggagtccaaaggctggagaacctgaagttctgaggtcagagggcaagaaagacaaatgtctgagctccagaacagagagtgagtgaatttgcccttcctctgcctttttgttttatcttatcccccagcagattggatggtgcctgcccacactgggtaagggtagatcgttcttactcagtctattgattcaaatggcagtctctttgggaaacaccctcataggcaaatgcggaaataatgcttttactagctatctgggtatcccctagtttagtcaagttgacaactaaaactagctatcacagtaaatttatgaaggtgtcaaagtatttatattactaagatttttaaaatatgaaataggatgaaaaccagggggtaaacttagtacagttatcaaattgtttttttcagcatgattgatttctaaaaggctttgaataaccatagatttaattttcttgtatatgacacagaccagtagattatggaatgctagacattgttcagtacaatattatataactgtagttagaaattacttagataccagagttatggttcttaaccacttgggtaccaagaatttttagagagcatgaaccatgtcgtctttttgttctggatggcatgaagttggggtctgagcatagatatcatcttaaaaagcctttcttgagactgtggtctctgttagaaatctctcatttgtgcttttaaagcattcagttttcctctttgttgtcatactaatcacattgtattgcaacttgcctgtttctgcattagactacaggctttcttttttctttttttttttttttgagacagagtcttgctatcttggctcactgtaacctctgcctgctgggctcaagcagttctcctacctcaacctcctgaatagggactacaggcacgtgccaccacgcccggctacttttttttttttttttttttgagacggagtcttgctcagttgcccaggctggagtgcaatggtgcgatctcagcttactgcaacctctgcctcccaggatcaagcgattctcctgcctcagcctcctgagtagctgggattacaggcacccaccatcatgcctggctacattttgtatttttgtagaaatggagtttcaccatgttggccaggctggtcttgaacgcctgacctcaggtgatctgccctccttggcctctcagagtgctgggattagagacatgagccaccgtgcccagccagtattacttaattcttataatagtcctgtattactaacagtttagcgagaagacagcattgttttagattttgcaaacctgtgtaatgtctggctttgtagaagacagacaaattctcatatttgtcactgcattcaccctattgcagtatgctttttgggttgaaatatccaaagaaaagctggcctcatatgtagcttgtaaagggaggagtattttaatagtcttttaaggtaatgttgatatttttctttcatatcacaccagaattctacagttggtagttttatattaatggttagttgccatgtaaaatcttacatcacattaatgaactttttgtaacctgttacatttaaaatccactggtctgtcttgcagtttgaatggatcttttatctatgtgtaattttataactcgtcatttgtaaggcattggttcactgatttatgcagatctttataatattggcacatcttattatacaatataaagaagtcaagctgggcatggtggctcacgcctgtaatcctagcactttgggaggccgaggcgggcggatcgctggagcttaggagttcaagattagcctgggcaacatggtgaaacgctgtctctaccaaaaatacaaaaaacttagccaggcatggtggcacatgcctgtagtcccaactacttgggaggctaagatgggaggatcacttgagcctaggaggcggaggttgcagtgagctgacatggcaccactgtactccagcatggacaacagagggagaccctttttcagaaaaaaaaaaaaaaaaaaaaaaaaaaaaaaaaaggtcaacatttgttaatactgccatcagtgtcatcagaaaagtcttctaagggctgggcatggtggctcacgtgtgtaatcccagcactttgagaggctaagtcaggcagatcatttgagtcagaagtttgggaccagtctgaccaacatggtgaaacctttactgaaaatacaaaaaaattagctgggcatggtggtgggcgcctgtaatcccagctactcgggaggctgaagaaggacaattgcttgaacccaggaggtcaaggttgcagtgaactgagataacaccactggactccagcctgggcgacagagtgagaccctctctcaaaacaaaacaaaacaaaaccaacagtgtaaaacgttcctgtttctccacagccttgccagcatctgttggttcctgactttttaataattaccattctaactggcgtgagatggtatctcattttggttttgatttgcgtttctctaatgaccagtgatgatgagctttttttcttatgtttgttggccgcataaatgtcttcttttgagaagtgtctgttcatatccttcgcctacttttgatgggattgtttgtttttttcttgtaaatttgtttaagtttcttgtagattctggatattagaccatagttagatgggtagattgcaaaaattttctcccgttctgtaggttgcctattcactctgatgatagtttcttttgctgtgcagaagctctttagcttaattagatcccatttgtcaattttgggttttattaaaattgcttttggcgttttagtcatgaagtctttgcccatgcctatgtcctgaatggcattgcctaggttttttcctagggttattatgattttgggttttacatttaagtctttaatccatctttagttaatttttgtataaggtgtaaggaaggggtccagtttcagttttctgcatatggctagccagttttcccaacgccatttattaagtagggaattctttccccattgcttgtttttgtcaggtttgtcaaagatcagctggttgtagatgtgtggtgttatttccgaggtctctattctgttccattggtctgtatatctgttttggtagcagtaccatgctgttttggttactgtagccttgtagtatagtttgaaggcaggtagcatgatgcctccagctttgttctttttgcttaaggttgtcttggctatatggattgttttttggttccatatgaaatttaaagtagttttttctaattctgcaaagaaagtcaatggtagcttgatgggaatagcattgaatctataaattactttgggcatatggccattttcacgacattgattcttcctatccgtgagtatggactgtttttccatttgtttgtgtcctcccttatttccttgagcagtggtttgtagttctccttgaagaggtccttcatgtcccttataagttgtattcctagttattttattctctttgtagcaattgtgaatggcctgatttggctctctgcttgtctgttggtgtataggaatgcttgtgatttttgcacattgattttgtatcctgagactttgccgaagttgcttatcagcttaaggagtttttgggctgagatgggtggtggcagtataaattagttcagccattgtggaagacagtgtgtcaattcctgaaggataaagaaccagcaataccatttgacccagcaatctcattactgggtatatacccaaaggattataaatcattctgccataaagacagatgcacacgtatgtttattgcagcactatttacaatagcaaagacttggaatgaacccaggtgcccatcagtgatagactggataaagaaaatgtggcacatatacaccatggaatactatgcagccataaaaaagaatgagttcatgcccttggcagggacatggatgaagctggaagccatcattctcaacaaactaacaaaggaacagaaaaccaaacaccgaatgttctcactcataagtgggagttgaacagtaagaacacatggacccaggcaggggaacatcacatactggggcctattgggggttgggaggcaagggaagggagagcattaggaaaaacaggtaatgcatgcagggcttaaaacctaggtgacgggttgataggtgcagcaaaccaccatggcacatgtatacctatgtaacaagcctgcacattctgcacatgtatcccaaaactgaaagtaaaacaaacaaaaacaaaacaaaacaaaacaatcccagaaaagtcttttaagtagtgtgaggctgttaagctagtttttttttattttttatttttcaagagacagggtcttgctgtgttgcccaggctgtactcaaactcctgggctcaagcgatcctcttgccttagcctaagctgatttttttttttgcttgaagctaaaattttatcattggcaacaaatactgtcagttgttttcttcgaattgactgtgttagcttgttccattgagagaaaatgtcttccaaatacccaagtccttacaactatagtttgtcagttagttgttctttaaagtaaaaatggtactctgtgaagaaaatggttaatttaacttgccactcaaacaattgcacaagtgcattttcttctgaaaactattatactttggtgtgcagcagaaatactttgtgtatttcctactttgtcacatagaatgttaaaaagatgtgtgctcaaaaggttggagataatttttactgtttcattaaagacagtcttagcacgtgcacacacacacacacacacacacacacacacacacacactttttaactgagcatatatggttgtacagtgactaccagtatactttggtgctgctgtttcatttgtgttaagacaccagcaatcttacccaccattgcttttgcatcatcacattagcacagtgaaaaaagcaaataatgtctcagtattattaggaaaattgctctgaccttatgaactctctgaaagggtcttgggggacttctggggtccatggaccacactttgggaatagctggaatagagcaagccctgtataagcccagcaatttgttgttcaatgttactttttcatcttatgtatgcatttaatgtagaaaataatatgttagtagtattcaagaatttggacatttgttaaagtctcagaatatattccttggagatagcaagagtatgctggagcaaacattttttaaataacttcattgaaacatgttttataatgcatattcttaagactcttcttcctaaaaggaataaagaattagttgagatttccataagggatacctttatatcagttgctaagttcagggtactgatcctgtataagaatagcttccaattcagatctataaacaacaaaatagtttagtgaaaacacacacacaggatttggagtggcagagaactagtagttctagagccagacagacctggtttgaaccctgactccactgttgtaaccttgggcaagttggtgtgaccacactgtcatttcttagcactctttactgccgctttatatgttcttgaggtctttcattagtactagaataatgatacaatgatagtgatgcatgtaatcatgacaattggaaacttgctatttcctccattagctaaaatttgaaagccataattgataaactttgcttaagttgtacatttttttgagataaggtctcactctgtcacctaccttagagtacaatagtgtgatcatagctcactgcagccttgaactcctgggctcaagggatcttcctgccttagcctcccaagtggctgggactgaaggcatatgccaccacgcctggctaattttttatatttttttgtagagacaagatctcgctttgttgcccaagctggtctcgaactcctgggcttcagttatcctcgtgccttggcctcccaaagtgctaggattacaggcatgagccaccgcatctggccaagttttacttttattttgtgaaaatagtacctggtagcctctgaataatatatatttcttgttgtgttttaaaatttgcttatttgtgttcatatattcactcttgataatttaataattattaaaacactctgtgcctggtacttgtttcatgctttacctgcattatttcatttaagatcaatatgtgaagtgggcacttctcttacatttaattcacagacgagaaaacagaggatacagggagattgagtaacttgtcctatatgatatggtttataagtggcagaactgagatgtaaactcttttctattaggttcttttttgctacaactaacaccagaaaagtagcttaaacttaggatgtatataggttatatgccagtactaagccatattattttattttgatttttttaaagagatgaggtcttgctgtattgtccaggttggtcttgaattcctatgcttaagtgatcctctcactttggtctcccaagtagctggaattatgtgcatgtgccactgtgcctagctactaatcattttatacaagggtctttctttttttctttttttttttttttgagacggagtcttgctctgtcacccaggctggagtgcagtggcgtgatctcggcccactgcaagctccgcctcccaggttcacgccattctcctgcctcagcctcccgagtagctgggactacaggtgcctgccaccacgcccagctcattttttgtatttttagtagagatggggtttcaccgtgttagccaggatggtctcgatctcatgacctcgtgatctgcccacctcggcctcccaaagtgttgggattacaggcgtgagccaccatgcccagcctgtacaagggtcttgagcatcatctgtggattttggtatccatgggggatcctggaatcaagcccccacagatactaagggactgtaaccaccattagtagggctgtgaagagagagtatgtgtgtaaggtcactattcctgagcatatgccagtaagggagacagcttaaacaaattaagggctctgccaacagaaagaagggaggtgggtaggaatgattatttacataggtaacaaagagtgtctgcacctttgtgtcttttaactactactatactgtactccctccctaatttaagaagatattttaaaatagcataaatgagggagaaatataaatggtaataaatttcaggatagaagaaatcctatggagatttgacagttacagtggttaggtagtctaagttctgatgcagatggataagtaatacagatcatgttaaaaagcaactttgggttgaattaatataactgtgtcctccgtggactgttgagtaaccacttgctttacttaaccctaattggcttcatattaaataatttggtttagctgtgtagtttcagggctatgggaagaaactgaggagattcggggaaaaaaaaatgaaatatgcattaaggagatgaagcataggctttctaagctaattaccagaattagtggaatttctctgtattttggttgagagaaagttagtaagtgaccttaatagttttcaagcttgtaaaatttctaagtcgaaatggttcttgtctctcccaccccttcaattcctagaagacgaaattgagattatcataaaatactttggttagaggtaaagaacagctttctgactgtagaggttattaaacactggatctcaggggaagagggccagctgtaggttttagtcaaaagatgaagtgaaaaggcaagacccataaatcacaaattatagtttaagcagtgaaattatagtttaagccatttttgaagctgttggagttgggacataattctgagtctgaatatttccacagtcaagctcctgaaggtcctgcctcccatcctatcctctctccccacttgagtgaatctttgttagcatttaagacttttacttccccccgtaaacagctctacaacagtgtagaatgtaaaaaattagaactgcaaatatgtgttgccctgacaaatacatcaactattttgattttctttcatgttgcctttctcagtatggctatttaaagtttcttaagacatttttttcccactaagttatttatatttattatagaaaaccagaaataacttctgtgaacatgttgtaatatttttctaaagctatttctttatatgcatgtgttttagagttgtgtgattctgtagtttcataacagcatgcataataacactgagttataatagttcccttattatctctttcctattagactgtgagcccctttaaggcatatattattgttttcatctttatataccttgaaaagttgatgtacttcacataaagatgaggcgagagttgtagatacaatttgtatattttcttgatctattattagcattttcttccaaattttattaaaatggatgccaataaaaacagatacattattcaactcactcttttgcccaggccctgccgtggtgaagatcacggctcactggggtgttgctttgttgcctaggttggtctcgaacttctgggcttaagtgatactcctgccttggcctcccaaagtcttgggattacaggtgtgagccactgtgcgagccgctgtaaccggcctaaagatatactttattttttaaagcagttttaggcccacagcaaaactgagcagaaagtacagacagttcctgcatacccctgcccttacacaacgtgcacagccttccccactatcgacattcatacatcagggtagtaaatttgttacagctgatgaacctacttgacacatcatttcttcaccttaagtctgtagtttatattagatttcactattgatgttatacattctatgggttttgacaaatgtatagtgacgtgtgtccaccattattagtatcatatggaatggtttcactgctctaaaaatcctgtcttcagcctattcctccctccctggaccctagtttgtcttgcctcaatacttttgccttttccagaatgtgatacagttgagtcacagaatatacagccctttcagattggcttttttttttttttttgagatggagtctcactctgttgcccaggctggagtgcagtggcgcgatctcggctcactgcaagctctgcctcctgggttcacgccattctcctgcctcagcctcccaagtagctgggactacaggcacccaccaccatgcccggctaattttttgtttttttttagtagagacggggtttcaccgtgttagccaggatagtcttgatctcctgacctcgtgatctgcccacctcggcctcccaaagtgctgggattacaggtgtgagccaccgtgcccggcagattggcttctttcacctagtaaaatgcatttactgttcctttgtgttttcgtggctttgtcactcatttcttagcatggaatagtattacattttgtctggatgtaccacagtctgtctgttcatctactgaaggacattttggctgcttgcaaggtttgacagttatgaataaagctgctgtaaatatccatgcgcaggtttttgtatgaatacgttttcaactcatttgggtaaataccagggagtgcaattgtggggtcatatggtaagactgtgtttagttttgtaagaaaccatcagactatcttccaaagtagctgtattattttgcatccccactagcagtgaatgaaatgacatcataaatttaaattcacttaaaatgtccaaaacgaaatctgtcagcatttttaaaaaaataaattaaaacaaaaacgaaacacttttaagctcaggaaagtaacctccagagtactttcagaatatcccagacaaattggggctttgcagattaatatttgcaggttgatctttgcctgggatcttccatataaaactaaaaaatgaagtctgtggtagctgttcttgcctagagtctctgctaacacagaagtttcgtgaaattttatggtgttaatcccttgtaaactatggatttagaaactcatattcccagactaagactagtctctttatttatttcttcaattcctagtagccaaaggtaattagattttacttttggcaggtgtatgctagcgatgtctactttatttaagaagatgctcaacctctaagtggtgtgggaggtgtttctaaaggtcactcaaggttggggtacagttgtggtggcaacccttccctgcctaacttgttgtttgctctatagggcaatgattcttgacctctttgggttatagatttcaatgaagtgtttctagggaaaggaggaacctgggagagatctgtcagtgctctctgctatccttttgtttgtagtgacagtatctgcaaaatatggggacaccttaagatgccttataatcttttagatctattaggttggtgcaaaaatgattgccgttaataacttcaaaatctaccggttagggatcattcagtaagcaagtaaatataccaactgaggtggagaaaagtgtaggcagcttgctttgagaattttagagctaaagtacagtgaagggtaattttaaattttacttcttttagaaggttttatttataattaaattgcttttttggttttatttgaataaatataaaattatacattcaaataattatttcttgaaattttctcctttattttaaaatgctggttagtatgtgatagttgtagcacatttaaagaagaatacaagtaaaaagtgcaattctacttctccctatacattgtttaataagcatatgccttttaaaaaatgaccttataatgggctgagtatattttggatattgttctgtggcagcataataccacataacttaattaactgtctccttattgttaaatgtttagattccctccttcctgcaccccctttgaaagcaatgctgacatgtgtgtccttgtaattgtactttgatatattggcaagtattttcctgggacagaattttgcagatggatcactggattattgtgtacatttactttaaaatttgcttaaagtcggggcgcggtggctcacacctgtaatcccagcactttgggaggccaaggtgggcggatcacctaaggtcgggagttcgcgaccagcctgaccaacatggagaaaccccgtctttactaaaaatacaaaattagccaggagtggtggtgcatgcctgtattcccagctacttgggaagggtgaggcaggagaatcgcttgaacccgggaggcggaggttgcggtgagccgagattgcgccattgcactccagcctgggcaacaagagcgaaattccatctcaaaaaaaaaaaaaaaaaatttcttaaaaattttcttttaattctaagagagttttatgttgacttctagtgctttttgggcgctgatgctcacacttattttgataaagatgaaagatgtttaccaaatagaatattggacatagaaactcccaaggaaattctctacgtagctgaatttcaggcagatggtgaagatgcaaggataatctcacaaagttatagctaacaatcactaattctgggtgatttggcaatgttttggcaagcagttattttaaactgctttctagtaagaaataattaaagtcaatgctttgatttaaaaagaatgcatatggttaaaatttaaagagttcagaatgctatctgtctactatatagatccctgctccccttctacaccaacctgtagaaaaactagtcagctcagttattcagaggctgatttcccagtttgttattatctgtgtacttttattctccacatttgacctgttactactcagttctacatctgctagtatggacatgtaaaggaaagggagagaatgtgatcagatctagtaaatgatgggttaattgaagaagttgtttaaagttaggagtcataaaaacataacatacatacactttaaacattttattttaacttgaaatcgaggtatacatttatttaccaagattttgatgttgggccaaggccttctggcattctatatcttggtctttctttcatccatttcccctataatgcttcattgtagatttttcaatgtacttaaaactttaaatccttaaatgtggtacaagactgtacattatgtggctctttgccagtttcttcgaaatctacttatccttaggttttctgtgataagtttcactgacttttcagtttccgaaacttgcctcagcgcctttccacatattgttcccataacctggaatgataatttctttaaatccttggctggcccagatcttttgaggtctcttctcaaatgttctgtcctcagagaggcttcgtaaatattagataatattccagtataaagtaggataaccccaacctccccacaagcccactaatatcacccttttctcttccttcactctacctgccaaatgtggcaggtagagtgaaggaagtgaacagggtaattttctttttacaagactgaagcctctgtgaaggcaagggccatccatatatattgggtttaccatagtgtaatagcctttggttagagcagtgtctgctatgtaataagaagcttaaatatttgtagacttaatcaaatgtttattatttatatataaagtgtcaggcactgtggggggcattacttagtaaaatgccacttagtcatctcattgatagcctatagtacattttaaaatggaagtgtgtacatccaagtatgcatttaatgaaatatgggacatttaaaaaagttttcagatgctaatactgaagagaataatgcaaatttactaaaataattaggaccctttttaaaacatgggggcaatgttgcttatctttttaaaaatagtcatttatttttcgttcactatcttaagaattctgatcatcttgtaggaaacttagaaacactaggaaggtcataggcactattattaataattatagaattgttttcctctaaattagagttttctttgtgaccctacataacgtaatgatatttgctctctggagagccaaatgggcctgaagtatagaaacagaactgaaatatagataattaaaactaaactaatatactataattctgattgttatgtcttaagatttgttggccttaataaggtgtgctgggataaacaaaaaggaaggcatcatttgtaaaggttttcttctttaatcccacttttgtttttgcatgaccagaaattctctgatatagcagggtatactttatataaagactatgggcagtaagtgtttagtgtttgtctttatattaggtctatagagtgtggtttcttgattatgggtgaggaaattagcctttcaaattccattagctgtaaagtggatttggatttggtatttgtattggttggctaatttaattcaaatcttttaaaattctcgtgctgaaatgatcttaggaagatcaaaatttctctaacagaaattattttggtctttgaagtgtataaatttaacctgttcataaaataagtattatcagctggtatgtttcttatacttttctgggaatacaaaaatgaataaagcatggtggttgtcttagaggaaataattgtaattgatgagatacatataaataatgtgatacgataaatgctagagtaggaatataaattatgtcaagtgttgtataagcactgtagagggagtgattgattctttgggagagttggagaaagttttatggatttgttaatccagacatatctaattattagggtttttaacacttttgtgtcttctctttttcctgtttagcttggtactttgccgttagaactcttgagtgaccaggtgcattgtaaatgagcaataatattttgaaagaaatcttttttcctgagcagtgggtctcaacaatggttttaaaatactcagtaaacagtgctctaagcagatgtgctgtcatttaggctttgttgttccatttatacagcacaggcagagtagattttgcataatttttaagggccgtatgatttttggaatgggatatgaacattggctacaacttaaagtcaccagttgtgttagcctctaacgagagtcagcatgtcctttgaagctttgaagccagtcattgacttctctctagctatgaaagtcttagatagcatttatttatttatttgtttatgatggagtcttgctctgttgcccaggctggagagcagtggtgtgatcttgggtcactgcaagctccgcctcctgggttcacgccattctcctgcctcagcctcccgagtagctgggactacaggcgcctgccaccacacctggctaattttttgtgtttttggtagagacggggtttcactgtgttagccaggatggtctcaacctcctgactttgtgatccacccacctctgcctcccaaagcactaggattacaggcgtgagccacgacgcccggcagatagcatttctttcagtagaagattgtttgtttacattgaaaatctgtggtttaatgaagccacatttatcaattatcttagccagatcttctggataacttactgcagcttctgttactgtattagtacttactgcttcactttatacttacatgtcatggagatggcttttctttaaacctcgcttatcgtttgaatatttctcccctccaaaacttctgttgatacttaatttccattgtggcaatattgagaagtgtggtttttcagaggtgattgggtcatgagggctctgccctcatgaattcattcatggattaatgtgttagtggattatcatgggagtgagactgactcattgctttttaagaagagaaaggggctggatgcagtagctcatgcctgtaatccttgtactttgggaggccaaggcaggaggattgcttgatcccaggagtttgagaccagtctgggcaacatagtgagactctgtctctacaaaaactaaaaaaataactagctggatgtggttgtgtgtgcctgtagtgccacctgtagtcccaggctgggtgacagaatgagactctgtctccaaacaaaaagaaaaaaggaagagagacctgagctagcatattcagcctctttgccatgtgattccctgttctgccgttctgctcagtactctgcagagagtccccacctgaaagaaggcccttggctgggtgcagtggctaacgcctgtaatcccagcactttgggaggccgaggcgggtggatcatgaggtcaggggatgaagaccatcctggccaacatggtgaaaccccgtctctactaaaaatacaaaaattagctgggcatggtggcgtgcacctgtagtcccagctacttgggaggctgagccaggagaatcacttgaacgcgggaggcagaggttgcggtgagccaagatcacaccactgcactccaccctggtgacagagcgagactccgttgcaaaaaaaaaaaaaaaaaagaaagaaagaaagaaagaaggctctcaccagatgctgcccatttaccttgggcttctcagcatccataactgtaagaaatcatttttttttataaattaccaagtttcaggtattttttaataagcaatagaaagcagactaagataaatgacatgaatcagcatctgctagtttcatacttttcttctgcggcttccttaccctttttatccttgcttagaattgaagagttagagcctagctctggattgggatttggcttaagacaatggttggttggtttgatattctatccaaagcactaaaactttctactcagcagcaaaaggctgtttcactttcttaccatttgtgtgttcagtggactggcactttaaattttttaaaagaactttatctttgcattcagacttcactgaccggtacaagaggcccagcttttggcctgtctccgcattcaacatgttgccttcctcagtaagcttaatcatttctagcttttgctttaaaatgagagacttgcaacttttcctttcatttgaacacttagaagccattgtagcattattaattggcctattttcaatattgttgtgtttcaggaatagggaggcccaaggagagggaaagagatggaagaacggctagttggtggagcaggcagaacacacagagactttaaactctgaagttcgctgtcttagataggtgcggtttgtggcacctgtaaactattgcaatagtaataccaaagatcgctgatcacagatcaccagaacagatagaataataatgaaaaagcacaataaagtgaagcacaataaaatgaggtatgcctgtaccttataatagcttgaaaatttcttaaattctgtgttttatctcaggaatgtgtgtgaattttgcatttcattgcatactgttaataaaaatatagaaatatttgaattactgccagaaaaaggaaaaacaaaaatcatttcctgtttgtctgttgatttttgaaaactggggtgaatgaagagagctgacactacatacctggtttagcacttactttctttttcttagtgtatccctggtatgtttcagtttatgcctgaagatgtacgtcaccagtttgagaaaaaaagattggccagtcagatcatgaaacattgcattacttttctccctcttacgtgtagtatagccttggggaaaattacttaatttgagtctgctaccctcataaattgggccaataatgtgtacccatactttttttgggaggggatcatatagtagctgctaattaaacatttattagctgcttcctccttttcctgccacattcctgttgctttcttcttggctttaacccaggtcttataactgcttggtatgctttaatcagcttgcttactgccctgatggtttttattagccagtgcgtagagaataatgctagaagatgcttggggcataagctgagacattcctggaataatagagacacactgactcaggaacagtcagtgcacagggaaatgttcggatttagcttatcagagtaagcaaaggtctagaaatacatctacattaatcagtggaaagatgggccagactaaaaattggaattagaatgtaggactgaatgcatttatactagagtctgctttctgtgcagcagtaaaagcaggtgatattgacttagtttttttcaaagtggttagagtattagactgaatggtctaaaaatttcatagatggaagtaaaggtatgttcaaaaatagactttctctgaaatgttataattgaacttagaacatttatgttagtggttttattctgtaaatgataatactcattcctgtaattctctttatgttgtcagtgtgtttcattaactatatctgcttgatctcaaaccttgattatttctctaactgcgtaacacatggcagttggaggttcaagagagtctaattgagtcacttatccacctgtctgaggtgttttttttttttttttttttggagatggagtctgtcactctgttgcccagcctggagtgcagtggcatgatcttggctcactgcaccttcacctaccaggttcaagtgattcttgtgcctcagcctcccaagtagctgggattataggcacatgccaccatgcccagctaaattttgtatttttattagagacagggttttaccatcttgccagactggtctcgaacttccaacctcaggtgatccacctgtctcggcctcccaaagtgctgggattacacacgtgagccactgcacccagcctctgatttcttaacagagaagagaaacaataagccaaacatggatcaaaataaagtattgagcttcattactggtaaaggtgagttagaaaatgtggtgaatattacagtattgcactcctagcaaaaagtgaaagcccccacatgaaaataggagaacaaaggaataggttttttgccagagtcccttcacataaacactttgggcaggaaactaggcaggcatgtcaccattgggcttcagatgggcacctgacaatgctgtcgttactgtaggagacagaccaccacaaagtgagattgatttggttgcttcagatctggactgaattatgtattttaattagctatattaaataaaacaaattaactcttttgaacgtattccttcatttgtaaggtgggaatacagttgagtgatgactgcgaacataaacatgactaaaatgcccagaactttctggtttatagtagtagtttctggtttagcaaatagtagtaataaaaggataactgttatccttaacagttattcttaacaaatcaaacctcgaatgtttacatctttaaaaattttaactgccacatttgttacattcttaaattgtgctgttaaaagtagacaacttggctgagcgcggtggctcacgcctgtaatcccagcactttggaatgcccaggcgggcagatcatctgaggtcaggagttcaagaccacccttgccaacatgacaaaaccctgtctctactaaaaatacaaaaattagctgggcatggtggtgcatgcctgtaatcccagctactcgggaggctgaggcatgagaatcgcttgaatctgggaggtggaggttgcagtgagtcgagatcttgccactgcactccagcctgggtgacagagcaagactctcagaaaaaatccccaaaatagaaaacctgtctccttaaactaatattgtttctctgacctactcatttcaggaaacaaaagactacaattgcctttatgctgatatgcccttatattgaagacttgaccatatataggaacattaaacagaatgccaggtagaggttttgattttcttgtcaaaataaaatgtcagaaatattcttcatgtgttttggggaagggagtattaataggggtcaactgtacattagtgaatacctgtcatttgaaataggagcttttaaaatagtatatatttaaggtgtaaaacatgatattttgatatacatatacatagttaaatgattactacagtaataggagcaataattttatgtgtgctgttctaagcacttatggtaactcattttatgttaacaacaatcctgtgagatgggaatatttatcctccatctgaaaaaaattaaggcacggagagaccaagttacgtgttcagggtcattaaactgatccatgtagaagccatgattcaaaaccaggcattcttagtgcccagcatggggtcaacactgacctgcttggctttggtacctctttaattgcattcgtactaagcactcagtcagtcataaccattctcttctcccttgtggtaattaatggtggtggtggtggagaatctacgggattaggcttcagttaattcttttttttttttttttggagacggagtcttgccctgtcgcccaggctggagggcaatagcatgatctcaggtcactgaaacctctgcctcctgggttcaagcgattctcctgccccagcctcctaagtagctgggattacaggtgtgcaccaccacgcccagctaattttttgtatctttagtagagatggggtttcaccatgttggccatgctggtctcaaactcctgacctcgtgatctgctcacctcagcctcccaaagtgctgggattataggcatgagccaccgtgcccggccggcttcagttaattctaaagcctgggactgtcagtaggattttaaatcttagagaccagttctgagaaagtgacctgttggctctgcattgcccccaggaaaagtgctaagattgttatcagttacctgacatctggtgggccggcacgccttagccacagtctcttgaatagtcaggaatgtctaaaaagttataagaagaaaaagcaacaggaagagacagacaacagataggtggttgccaggagtgggggaaggagagaatgggtagtgactgctggtgggcacagggtttgctttgaaattagattgacacaaattattattttccagtttataaaatcaggtttttcaggaggtctttacattgaatcacaagtgatttcaccctaatatggtgtgaattgattttattgttcactcttagttctttataaactaatttccccctccttgagtgtttgttttaaaattttggctctttcttgataacctggaatatatatatttggataattattttcaggaagagtatattatatgagtgatctcttttctgagttcttgttcagttgagaaggacttgattatgtacatgtgcagatatgggattctcagattttgatctttatgtttctccctgggaaagtttaagggttgatccattataatctggcttttagttttccagaggaaagggctaagtctgagattaacttgattcctcttggcccttccgaatatccatttctccttttttcctctttgtagataatcttttttgatttcttgtttttctgtaggattgaaaaatgtttttattaggctgtatttagatattggcatgttttaattaatttttccctatatactcaaaatctgtacatgttccgattcagatttttcttcagtttagaaaaatttccttctcgtatttttttgagagtgtaatatgtttaagaccacagactgaggagccagattgtttggtttccaattcctgttatgatactagtaactttgggtagggttcttaatcaattctttctttctttctttctttctttctttctttctttctttcttccttccttccttccttccttccttccttccttcctttcctttcctttcctttccttctttccttctttccttctttccttctttccttctttcttttctttcttttctttcttttctttctttctttctttctctctttctctctttctctctttcctttctttcttttctttctttctttctttctttctatccttctttctttctatccttcttcttcttttttttttttttgagacagagtcttgctctatcgtccaggctggagtgcagtggcgtgatctcagctcactgcaacttccacctcctgggttcaagtgattctcctgcctcagcctcctgagtagctgggattacaggcatgcaccaccatgcctggctaattttttgtatttttagcagagacagggtttcaccgttttagccaggatggtctgggtctcctgacctcgtgatccgcccaccttggcctcccagcatgagccaccacgcctgggctgtagttctttttattttcttcttgtggaattattttatttagattgcctcttttggatatgatctccatatttttctttcctcagcatttgtacttctttctttctttcttttttttttttttgagactgagtcttgctctgtcgcccaggctggagtgcagtggcacgatcttggctcactgcaagctctgcctcctgggttcacgccattctcctgcctcagccttccgagcagctgggactacaggtgcccgccaccacgcctggctaattttttgtattttttggtagagacggggtttcgctgtgttagccaggatagtctcgatctcctgaccttgtgatccacccgcctcggcctcccgaagtgctgggattacaggcgtgagcagcatttatatttcttaatccttttattctttctgggaaaattttttgagtttttaatcttttttcttttttttttttttctctttactgaagttctaatctggccagttctgctgttgttttcatattattttttctctgcaatttctccaaatcttagattgtttcctcatcataacttcctgctctagtttcttgtttgtaatcttctcttggattgtcctgagaacatcaattagaaattttataaacatgttttcctgtatcttatagtaaatctgtttctgaagaaattgtgcattcattgtttaggctagtatccataatttgaattatggtatttttttggacatcaactttgtcttctgctcatttttataagtgggaggtctctgccagcttagtattagtcttagcataaggtggaatttgagatgttttataacaaaggtagatatagatcatattaaatttttgatttaagaaaaatgaaaggtggcaatatttcttgaagccccaggaatgactgatctgggattcatattatcataaaagagaacaataagtgataaacattaatatttatttagctttttaaaatgtgccaggcactgtgcccagtgctttacatatgaattatatccttttctctttctcagcaactttatggtagatactgtttttcctgtaaacttaatgaagttgaagtttagagatttactcacctaaggtcataaggctcataaatagtagagccaggattaaacccaagtgtctgactccagcagttgagtgtcaaatagttaggttttaatggcctcttgtcaatatcccaaagggcttgaactcttataagtaggtttggttccagactgatacactgcccgatcttaatcatgatggtcagtagaagatgtgtttagatccctcttggtgaaaggagcccctgagtttccacgtaatacacttggaaaaccatagaatttgtttccttaattttgctcattcacaacccctctgtcacactgcttgattctctgtttcttaagcgtagcacaatacgtctgatctcttgtttttaaaatatctgttatgcctggacaacatggtgaaaccctgtctgtactaaaaatacaaaaattagccgggcattggttgcgggcgcatgtaatctcagccactcgggtggctgaggcaggagaatcacttgaactcaagaggcggaggttgcagggagctgagattgcaccattgcactccagcctgggtaacgagagcgaaactccgtctaaaaaaaaaaaatctgttatggtgtgtgttatgtagatattcttagagttctgggcatgtagctgacaccttttcatgaagtgcagaaaaacccattttatatgaatgtgttttcagaatcagccatagttcctgttacagaagatggacccaataattattggttgtgtgaatgttgtatgaattaaattagataaggagattacatagcatactcctctaaaatgcgcatatttaaagtagttgggtatatgtatcatgatcaactggaaaccttttttgaaatacagatgcttattatgacttagaaacactgttctaattatagtctaatatatagtgattattatagtctaataatcactgactataaaagtgattgaatagttcttggtaaataattgttacttttcttgatttttaaatattcatgctgtaatgataaaaatgtccaaatccatagtgtatatggtttagatcttgtttataatatacagagaaaggccttcaggagtttcttgaagtaataaatacattattgttgagttcattttggagttatttactgtactaaaccagcctcacaatgactttgcagatttgtgatattactcttggcttttagagagagaaggacacacagtaaataatccctaaattcaaggaattgacttaatgagaatagttgaatttttaagctctttggattctgagttagtatttagatttatttgatttaagatgattgttgaagttacatgaaaataagtctttccaaaatgaaaatctttttagtaatcaaatgaggattttctgatagcaacagggtgcattggaaatgagattttctgatcagcagcagcatgcattgcactgtattggggaattgaggtaaagtaatatttaaaagttcatattattggccgggcaccttggtcatcaagagtgagtgagtccaacaactagcaggtgtcttggcttgtgaggcgccccctccagcattaatgggaaaagagatgagggccagggccgggcatggtggctcacgcctataatcccagtactttaggaggctgaggcgggtggatcacctgaggttgggagttcgagaccagcctcaccaacatggagaaaccccatctgtactaaaaatacaaaattagccgggcgtggtggcgcatgcctgtaatcccagctactcgggaggctgaggcagtagagtcgcttgaacctgggaggcggaggttgcagtgagccaagattgcgccattgcactccagcctgggcaacaagagcaaaactccatctcgacaaaagaaaaagttcttattactgaggaaaattaaaaaattcagtgccttcaatataaacacttaaagttatgggatatgaaaattatggacatatcagacctgaattttatgttattttactcactcgaccagtaagatcttgagtcatatattttagtggaggcaattttattcatgtattgttttttttcttttttaagacagggtctcgctctactgcccaggctgaagtgcagtggtgtggtcttggctcactgcaacctctgcctgccggattcaagcaattctcctgcctgagcctcctgagcagctaggattacaggcgtatactaccacactcagccaatttctgtatttttagtagagatggggtttcactattttgaccaggctggtctcgaactcctgaccgcaagtgatccgcccattttggcttcccaaagtgctgggattacagatgtgagccaccatgcccggcccatacattgtttttcaattctaaaacattctgttttaaaagatcagttgttttgttcattatttccttaatagtggattccttcatgattgtgagagccaattcaatatctctaacggtcttttgaaaatcttaaatagggcaaattttattctgggtttccatgagtcaaaaatcagtgttgatggttcttgtctcccctccctcataatgtggtttggcaaaatgcttcagggaaataacagtgagggtgattgagggaaaactgaaaaatccatgaaggaagtaatagctattcttagaattattggctctaaaaaatactttcttaggttctctctagtcatgattactcataggaaacaaatatgaggtttatagatttaaatccaggtatttctttaaagagaaaataaatgttaaagaagtcatattcattgttttcattaagatttgagattttcgtaacaagttagagtaagagggaagtaaaaatcaaataagctaaaataggtacctgagatgtctttttcttccatgttagacagataatgtaccaatgctgtagcaaggtttgagggaggcacatctcatatgtgtgtgaaaacccagttatcatgcttatgaactacaaaaggatctatatgagttcttgtgtaggtgttagctaacaatctggtgttcctaaaatgtgaaacacatatatcttactctttggcaaattaacaaagtaagctggcataacagcttctattcttgacaggaaaattctatacctttttgtacttgattagtccattaggttattatctacagttacctgaatatgagtaaaaattaaaaagaaatctgtatatgaggtagagggatggctcctagaaaacatgtatatacagatgtttttgccataaacctatagaataatcatattttactagagtagatttaatcagttggggagattgttgaaactgcttccagaggtggcacaagttatattttgaaggttacaaattgtgttatatttagtttatgccactttgatacttctaaggtttaaattttctgtgcttttttgtttacttgacatttctgggattgagatcatgtttgtttcctgctatatttgttttctagtcacgttgaaccttgtttttctaataattatgctgcaatattatttgatacatacaattttagctatgttctcttgtccctgctggtattttgcatttatataaataacctttataggataaagtacagtgtcttttgttttgaaaaaagatgaaaaactttttcaatgtgtccccgtttggtttcagttatccacatctgaagtcactgtggctttgcctgtttaaacaagtttcttttcttgtcccttcagtagcaaccaccagggccgtcgttttacatgtcacttttctttcattcagaaagaggtgctcactttggtcgttaatttttgttttagtctgctcctatcattatggtagtttatagaaactattttttaattttagttttaatttttctttttttgcagagacaagagtctccctctgttgctcaggctggtcttgaactcttggcctcaagcagtaatccgtcgcaggctcccaaagtgttgaaattacaggtgtgagccaccacacccagtgtagaaattttttttttttttttttgagatggagtcttactcaagtgattctcctgcctcagcctcccgagtagctgggattacaggcacccaccaccacacccggctaatttttgtttgttttagtagagatggagtttcaccatgttggttagtctagtctcgaactcctgagctcaggtgatccgcccaccttggcctcccaaggggctgggattacaggtgccaccgcacccggcctagaaactattctttagctgtgatatgtactttattctatcatcatttattttatgtagatgctacacagtgtgctagagtctaaagggaatgtgtgcttgtatttttcttttttttgttaaactacctctcatgctattattgcttggcttttttttttcttttttttaattatactttaagttttagggtacatgtgcacaacgtgcaggtttgttacatatgtatacatgtgccatgttggtgtgctgcacccattaactcgtcatttagcattaggtatatctcctaatgctatccctcccccctccccccaccccacaacagtccccggtgtgtaatgttccccttcctgtgtccatgtgttctcattgttcaattcccacctacgagtgagaacatgcggtgtttgattctttgtccttgcgacagtttgctgagaatgatggtttccagcttcatccatgtccctacaaaggacatgaactcatcattttttatggctgctagtattccatggtgtatatgtgccacattttcttaacccagtctatcattgttggacatttgggttggttccaagtctttgctattgtgaatagtgccacaataaacatacgtgtgcatgtgtctttatagcagcatgatttataatcctttgggtatatacccagtaatgggatggctgggtcaaatggtatttctagttctagatccctgaggaatcgctacactgacttccacaatggttgaactagtttacagtcccaccaacagtgtaaaagtgttcctatttctccacatcctctccagcacctgttgtttcctgactttttaatgattcccattctaactggtgtgagatggtatctcattgtggttttgatttgcatttctctgatggccagtgatggtgagcattttttaatgtggtttttggctgcataaatgccttcttttgagaagtgtctgttcatatccttcgcctactttttgatggggttgtttgtttttttcttgtaaatttgtttgagttcattgtagattctggatattagccctttgtcagatgagtaggttgcaaaaattttctcccattttgtaggttgcctgttcactctgatggtagtttcttttgctgtgcagtagctctttagtttaattagatcccatttgtcaattttggcttttgttgccattgctttctgtgttttagacatgaagtccttgcccatgcctatgtcctgaatggtattgcctaggttttcttctagggtttttatggttttaggtctaacatttaagtctttaatccatgttgaattaatttttgtataaggtgtaaggaagggatccagtttcagctttctacatatggctagccagttttcccagcaccatttattaaatagggaatcctttccccattgcttctttttgtcaggtttgtcaaagatcagatggttgtagatgtgtggtattatttcttttgctgtgcagaagctcatgaatttaattagatcccacttgtcctttttttcctttattgtgattgctttgatgtcttcgtcatgaaatctttgcctgttcctatgtccagggtggtattttttaggttgtcttacaggatttttataattttgggttttacacttaagtctttagtccatcttgagttaatttttgtttatgatgtaaggaaatggtccaccttcagtgttctgtgtgtggctagccagtttatcccatcactatttattgaatagggagtcttttccccattgctcatttgtatatgatgtaaggaaatggtccatcttcagtgttctgcatatggctagccagttatctcatcaccatttattgaacagggagtcttttccccattgtttttgtcagctttgtcaaagatcagatggttgtaggtgtgtggccttatttctgggctctctattttgttccattggtctatgtgcctgtttttgtacccgtaccatgctgttttggttactgtagccctgtagtatagtttgaagttgggtaacatggtgccttcagctttgttatttttgcttaggatttctctggctgttcaggttctttttttggttccatatgaattttaaaatagtttttcctagttctgtgaagaatgttgtttgataggaatagcattgaatctgtaaattgctttaggcagtttggccatttcaatgacattctatccatgagcatgggatgtttttccatttatttgtgttgtttctgatttccttgagcagtgttttataattcttagtgtagagatgttctacctcgtggttggctgtattcccaggtattttgttctttttgtggcaatttggaatgggattgcctttctgatttggctcttggcttagctgttgttggtgtataggaatgctagtgatttttgtacattgatttttttttttttttttttaaagatagtgtatctctctgttgcccagagtgcagtggcactagagtgcagtggcacaatctcggctcactgcaacctccacttcccaggttcaagtgttcttgtgtgtcaacctcctgaatagctgggatttcaggcatgtgccaccatgcccagctaatttttgtatttttagtagagacaggatttcaccatgttggccaggctggtctcaaactcctgacctcaagtgatctgcccacctcagcctcccaaagtgctgggattatacgtgtgagccactgtgcctggcctgtacattgattttgtatcctgaaactttgctgaagttgtttatcagctgaaggagcttttgggctgagactggggctttctagatatagagtcgtgttatctgtaaacagagatagtttgacttctactctttctgtttgaatgctctttcttactcttgcctaattgctctggctaggacttccaatactatttttaataggagtggtgagagagggcatccttgtgttgtgccggtttttacagggaatgcttctagcttttgaccgttgagtataatgttggctgtgggtttgtcatagatggcttattattttattccttcagtacatagtttactgagaatttttaacatgaaggggtgttgaattttaccagaggccttgatatggtttagctctgtgtccccatccacatctcatattgaattgtaatccccagtgttaggggagggacctggtgggaggtgattggatcctgggggcggatgtctcccttgctgttctcatggtagtgagtgagttctcacaagatctggttgttctcacgagatgtggagtgtagtacttcccccttcactctctctctctttcctgctcctccatggtaagatgtgcttctttgcccttcgccttctgctatgattgttaagttttctgaggcctaccagccatgctttctgtacagcctgtggaactgtgagtcagtgaaatctcctttcttcataaattacccagtcatgggtagttctttatagcaatgtgagaatggactaataaaggccttttctgcttctcttgagataatcacgtggtttttgtctttagttctgtttttgtgatgagtcacatttattgatttgtgtatgtttaaccaacttcacatcctggagatgaaggctgcttgattgtggtggattagctttttgatgtgttgccggattcggttttcaagtattttgttgaggatttttgcgttgatgttcatcaaggatattagcctgcagttttcttttattgttgtgtttatcaggatggtgctggcctcatagaatgagttggggaggagtccctcctcctcagttttttggaatagtttctgtaggaatggtaccagctcttctctgtagatctggtagaattcagctgtgaatccatcaggtcctgggatttttttggttggtagacgttttattactgattcaattttggagcttgttattggtctctgtggggaatcagtttcttcctggttcagtcttgggaggacatatgtgtccaggaatttatgtctcttttaggctttctagtttgtatgcatagaggtgtctgtagtagtttctgatggttattttttatttctgtggggtcagtggtaacatttcctttgttatttctaattgtgttctctcttttctttattactctagctagtggcctatgtatcttactaagtttttcaaaaaaccaactcctggattcattcatcttttaattgttttttcttgtctctatttacttcagttcagctctgattttgaatacttcttttcttctggtagctttggtgttgatttcttcttgcttctctaattctagaaacccaatttaaactaatttgtgcaaaaataatttgttgaaaggaatattttagggaaataaaaaatggaagatttattaagactgaggatggggacaattggagctaggcctcaggaatgactcagggatatgacttggttaagaccctttttcttgtctccgtctagggtttacttttctctctcactgcacactgtcattcttcattgaggaaaaacatggctggtcactagtccaaaaatcttagaaattggattaattgatctagcttagattcatctatttggctgtggggttgacatttttataaaagctatgtggtttaagtagagagaaggcttattcgcagaataagatgtttgagaattattgttggacagataaaaataggtatccattaaagtaatgtgaattaataaagttcttttgtccccttttcagagctagagacatacttgtgtacatgcatacatattggtttggttcttgcttgggaactagagtagtggatagactgtttagtaaacaaaagtcatggtaattttttcctggattggctcagtttttcaaagcacagaagaattttggttggcaaatgttgttctataaagtatttgtccattttcttagtgtaagttaagaatagttccctttctacttttgttatggatctcctacagtcattctaattctaatgcctgatagtctttgcagcctatccaatcttgactcacccttatatttttaggtttctattttagctcaggagccacttgaaaatgagtaggcacaaacacgtgatctaaaagcaagaaggaggctaaccacatttggcactgaaggaaattagatcacgtgcactgtgattgcacactttcgaatatgttacgttattttgggaagaaaatagctttcagttagacattgctgaatattgttgtactatttcttgtatatgtgaaaattgtagttttaggcatccaagtgaggtattaatttagatatcattattgctcatttagcaaaaatgatgtggcattaaagtaagaattataagctatttcactggtagaattgctgtaggtatgggggagaagtgtgtctttaagtgatttaatttaatctaaatatttattgagctcctttgagtttagaaggggatggatagaagaaacaaaacactgatacataccagattttctataatgctgataagcttctgttccttatttccgtatatctttaaaatgccctgaaagtgaaaatatttatgcctatatttccattattttttgcacctgaagaaacataaaaatcttttgtcagattttatattctgatttttagattgcaacagagcagtcttaactaaatgcattttaaagcagttttgcatttgtacactgctctgtagtacatgctgcgttgaaatggatgtattagtctgaagttcactagaacagtgagcttcatattatttaaaagacctctgagaatattccagctgttatttcttttgatttgaaataatagcagattgccatacataaagacaaagttaacattttgttatagcacactgctgcataatagtagacttagtaaattatattttgaaaggacgttttggaatgtaggtcaggagctgactggattcttctggaaatcacatagcatgagaatcttgagtcaagtcagtacttgactttagaactcatgcagtccaacttcctacctgatgctggaatccatcttgctatcccaaataattcatttggttattaaagaagtatttattgaggcatagtgtgtgtagatactgtcctggggatgtgttggctaaaataaaaatagacttggtccctgcccatgtgcagataggtcttttttagaaggctattaattattgttgattcagtttcttgaaaaatataggggtattcaagttatctgtgtctcctggtgtgaattttggtactttgtgtcttttaaggaactggtctccttcatctaagtggccgaatttgtggataaagagtctaacttgtagttgggtgttcagtgctcaatcagtctcaacaagttattttttgaatcaagtactcaagttgggaagaattgacaatttaacaactttgaatttcctaatccatgaacattgaatatctctacattaattagatctgatttaatttccttcctcagtgttttttagatttctgcttacagaccctatgcatattttgttagatttatacctaagtatttcaatttttcccttgctattgtaaatgatactgcttttctaactttcaaattcctattgtccattgtatgtagggaggatagtgacttttgtatattgaccttgtatcctccaaccttactgtacttgcttattagttctgagggttttttttttctctttttgaatctttaggttttccacattgacaatcatgtaatctgtaaataaagacagtttgatttcttcctttccaatctgtatacgttttatttcttccaatcttagggggaaagtgtctgcttcgtgattattaagtgtgatgttttgtaaatttatttattggaggaaattcccctcaattgctagtttactgagagtttttgttttgttttgttttatgagtggatgttggattttgtcaaatgcatttcaattgacatgattatgatttttctttagcctattgatatgtagggtgacattgattggtttttgaatgttgagccagtctttcgtacctggtatataattcttttaatacattgttggatatggttttctaatattttgttaagaatttttgtattaatgtcattatagatatggatgtatagtttttcatttttcttgttatctggttttggtattagagcagtgctgatctcacagaatgagttagaaagtattacctctgcttctatattctggaagatattgtggaaaattgatattatttcttctttaaatgtttggtggagtttaccagtgaagtcatctttggtgcttcctttaaaaatatagggctattcagtttatcagcttggccatagtggggtagaacagcagtccccaacctttttggcacaggggaccagtttcatggaagatggttgttgtccacggaatgggggctggatgaaactgttctacctcaaattatcaggcattagttagattcttgtaaggagcactcaacctagatccctcacatgtgcagtacacagtagggttcacactcctatgagaatctaatgccactgctgattggatgtgaggtggagctcaggcaataataatactcgcttatgcattgcgtacctcctgctctgtggccttgttcctaacaggcctgggaccagtatcagtctgtggcctgggggttggggatgaggtagagcacaaagtggagtctttgggtccccttttccaggccttggctcttagatggtatttctggacctgccctggaccagaggggagccctctgccctgaggaatgagtcccaggccagccagcattcaccagaaactgactgaagagcccttgggccttaagggaacatcggcagtagcttggaagtataccaaatgggcctgtgttgtgggtggccacaggataaggctcctctgcctgtggaaacgacagggatgagtggaagaattgtgtcttgtggtttgagtgccagctcatctgtagcatagtagaatattaggtagacttctaggtttttaaactccagtccctggctcccagatgacacttcttgacccacctggggcccaggggaacttgttgccctgaggggaaggacacaaacctggctggctttgctacctgttgattatacagcatcaagaccttgagctgccataggcggtagccaggtagtgcttacagcaggcctttggtgagacacagtgctgtcctgactttaggtttgactcagtgcagtttcagtggtggtgaaacaggagtcttgtgtcactctatcctcagccccaggtggcacagaacagagagggagattccattggtttgagagaaagtaagtaaagagaataaaagtctctgcctggtaatcaagagaattctcccagatctcttacgcaagaccgtcaaggtgatacctttgtgagtctgcaagatccacagtgttactgggtttggatggagtgcccctaatgcagatacagcttagatcacaacacctaagtccttttgaatgctaggaaagccttcccaagaagatgggtacaaacaagcccagactgagaagactacagtagatacctaactcttcaatgcccagacgcagatgaacatcgacaagcatcaagaccattcaggaaaacatgaccttaccaaaggaactaaataaggcaccagggaccaattctggagaaagcgagacagaaaattcaaaatagctgttttgaggcagttcaaagaaattcaagaaaacacagagaaggaattcagaattctatcagatatattgaacacagatttaaataattaaaaagaatcaagcagaaattttggaattgaaaaatgctgttgacacactgaagaatgtattgaagtcttttaatagcagaattgatcaagccgaaggaagaatttgtgaacttgaagataggccatttgaaaatacacagaggagacaaaagaaaaacaaaacagaacaaaaacaatgaagcatgcctacaggatctagaacatagcctcagaagggcaaatctaaaagttattggccttaaagaggagatagagaaagatatgggtagaaagtttattcaaaggggtaataacagagaacttaccaaatctacagaaagatatcaatatccaagtacaagaaggttatagaacaccaagcagatttaaaggaagatgatgtctgcctcaagacatttaataatcagacttccaaaggtcaaggataaaggaaggatcctaaaagaagcaagagagaagaaacaaataacatataatggagctccattgtgtcagacttttcagtggaaaccttatataccagaagagagcagcaggacatgtttaaagtgctgaaggaaaaaacttttactctagaataatatgtttggtgaaaatatcctttaaacatgaaggagaagtaaagactttctcagacaaaagctgagggatttcatgaacaccagacctgtcctataagaaatgctaaagggagtacttcaaccagaaagaaaagaacgttaatgagcattaagaaattatctgaaggtacaaaactcactggtaatagtaaattcacagaaaaagacagagtatggtaacagtaactgtggtgtgtaaactactcttgtcctaagtagaaagactaaatgatgaaccaataaaaaataataactgcaacaacttttcaagacatagataatcaaaaaagatataaatagaaacaagaaaagattaagcaggggataaagttagggtgtagtgtctttatgagttttcttcttgcttgtttgcttgcttatgcaaagtgttgttatcagcttaaaataatgggttacaagatagtatttgcaagactcattgtaaccttaaatctaaaaacatacaataagtacaaaaaaattgagaagcaagaaattaaatcatgccatcatagaaaatcaccttgactaaaaggatgacagaaaggaaagaaggaagcaaataccagaaaacaagtaacagttataggagtaagtccttacttatcagcaataacagtgaatgtaaatggattaaactctccaatgaaaggatacagagtagtggctgaatgtataaaaaaccaagacccactgatctgttgcctacatgaaacatactttacctgtaaagacacacatagactgaaaataaaaggatggaaaaagatattccatgtcaatggaaaccaaaaaggagcaggaatagctatacttctatcagacaaaattgattttaagacaaaaactattagaagagacaaagaagatcactgtataatgactaaaaggtcaattcagcaagaggatataatgattgtacatatatatgcacctaaccctagagcacccagatatataaagcagatattagagctaaagagagggatagacccaaatacgataacagctggaaacttcaacacatcactttcaacattgaacagatcttccagtcaaaaaatcaacaaagagtaatcagacttaatgtgccttatagaccaaatggacctcatagatgtttatagaacatttaatccaatgactgaagaatacatatttttttcctcagtacatggattattcttaaggatagaccgtacttaggtcacaaaacaagttttaaaacatcaaaaaaagaaataatatcaagcattgtctctgacgacaacagaatgaaacttaggttggtgcaaaagtaattgtggtctttgccgttaaaaaggcaattacttttgcaccaacctaatagaaatcagtaacaaaaggaattttagaaactatacaaacacatggaaattaaacaacatgctcctgaatgaccagtgcatcaatgaagaaattaaggaggaaattgaaaaattcattgaaacaaatgataatggaaacagaagataccaaaacatatatgatacagctaaagcagtactaagagggaaatttattactgtaagtgcctacatcaaaaaagaagaaaaacttcaagtaagcgacctaacaatacttaaagaactagaaaaacaagagcaaaccaaacccaaaattagtagaaaaaaagaaataataaagatcagggcagaaataaattaatttgacatgaagaaaataatataatagatcaacaaaaccaaaagctggtggtttgaaaagttaatgaaaattgacaaacccttagccagactaagagaaaaagagagatccaaattaataaaataaaatcagagatgaaaaaggaggcattacagttgatattgcagaaattcaaaggatcattagtggttactatgagcaactatatgccaataaatgggaaaacctagaagaaatggctaaattcctagacacatacaatctatcaagattgaactgtgaagaaatccaaaacctcaacagaccaataacaagtaatgagattgaagctgtaatgaaaagtgtcctagcaaaaaaagcctgggacctgatggcttcactggtgaactttcccaaacatttagagaactaatcaaatatattcaaactattccagctgggcatggtggctcatgcctgtaatcccagcactttgggaggctgaggtgggtggatcacctgaggtcaggaattcaagaccagcctggccaacatggtgaaaccctgtctctactaaaaatacaaaaattaactgggcacggtggtgcatgcctgtagtcctagctactctggaggctgaggcaggataatcacttgaacctgggaggtggaggttgcagtgagccgagattgtgccactgcactccagcctgagcgacagagtgagacttactcaaactattccaaaaaatagaggagaagggaatactttcaaagtcattctaagaggctaatattaccctcatacccaaccaaagacacatcaaaaacaaacaagtaaacaactgtaggctaatatctctgatgaatatcgatgcaaaaatcctcaacaaaatgttaccaaacaaaacacaggaacacattagaaagatcaaattgatcacaatcagtgggatttatcccagggatgcaaatatggttcaacagacacatatcaatcggtgtgatacatcatatcaacagaattaaggatgaaaaccatatgatgatttcagatgatgatttcagttgatgataaaaaagcatttgaaaacattcaacatcgcttcgtgataaaaacccttaaagaactgggtaaggaagaaatatacttcaacataataaaagccatgtatgagagacccattgctaatatcatactgaagaaggaaaagctgaaagccttttctctgagattgataacacaataaggatgcatactttcactgcttttgttttcagcatatactggaagtcctagctagagctatcagacaagagaaagcaataaagggcatacaaattggaatggaaaatgtcagattatccttgtttgcagatgatatggtcttatatttggaaaaacctaaagactccaccaaaaaactgttagaactgataaacagatttattaaagttgcaggataaaaaatcaacatataaaaatcagtagcatttctatatgccaacagtgaaaaatatgaaattgaaaccaagaaagtaatcccatttacaatagctacaaataagataaaatacctaggaataaaccaaagaagtgaaagatctccacaatgaaaaccataaaacattgatgtaagaaatcagagaagacacaacattggaaagatattccatgttcatgggttggaggaaccaatattgttaaaatgtccatacttacccaaagcaatctatagattaaatgtaatccatatcaaaataacaatgacattcttcacagaaatagaaaaaaaagtcctaaaatttatatgaaactacaaaagacccagaatagccaaaactatcctaagcaaaaagaacaaagctgcagcaatcacattatttgcttttaaattatgctccatagctatagtaaccaaaacagcaaaaaccagtactagcaagaaacacatagaccagtggaacataatagggaacccagagataaatctgtacatctatggtgaactcagttttgactaagctgctaagaacataacactggggaaaggacagtctgttcaataaatggtgctgggaagaatggatatccatatacagaaggatgaaactggacccctgtatctcatcatgtacaaaaacaaaattaaaatacattgaagactcaaatataagacctcaaactatgaagctactaagagaaattattgggaaactctccaggacgttggactgggcaaagatttattgagtgataccctaaaagcatgggcaaaaaaagcaaaaatggacaaatggtatcacatcaagttaaaaaggtatctgcacaacaaagaaaacaatcaacaaagtgaagagacaacccacagaatgggagaaaatattttcaaactacctatctgacaagggattaataaccagaatatataaggagcgcaaacaactctataggaaaaagtctaatctaattaaaaatctaatttagattgggtgcagtggctcacgcctgtaatcccagcactttgggaggccagggcgagtagatcacctggggtcaggagttcgagcccagcctggccaacatagtgaaaccctgtctctaccaataatacaaaaattagctgggtgtggtggtgcacacctgtaatcccagctacttgggaggctgaggcaggagaattgcttgaaccagggaggtggaggttgcagtgagccaatgttgcgccattatattccagcctgggcgacaagagcgaaactccatctcaaaaaaaaaaaataataataataaaataaaatctaatttaaaaatggacaatagatttgaatagacatttctcaaaagaagatatacaaatggcaaaaaggcatatgaaaaggtgcttagcaacactgatcatcagagaaatgcaaatcaaaactacaatgagatattatctcaccccaggtaaattggcttttattcaaaagtcaagcattaacaaatgctagtgaggatgtggagaaaaggtaaccctggtacactgttggtgggagtatgcattagtacaagcactatgaagaacagtttatatgttccttagaaatctaaaaattgaggtttcacatgattcaccaatcccactgctaggtatatactccgaagaagagatatctgcactcccttgtttattgcagcactactcacagcagccaagatttggaagcaacgttaagtgtccatcaacagataaagaaaatgtatacatatacagtggagtactattcagccataaagaagaaggagatcctgtcattttgcagcaacatggatgaaagcagatgtcattaggttaagtgaacaggcacagaaagacaaagttcacacattctcacttatttctgattgctaaaaattggaataattgaactcatgtagatagagaattagaacaatgattaccagaagctgaaaagggtagtgggaaggtgggatgggtaagggacatggggatggttaataggtatgaaaaaataattagaaagaatgaataaaacctagtatctgctagcacagcagggtgaatgtagtcaatttaattggacatttaaaaataactaagagaataattgaattgcttctaacacaaaggataaatgcttgaggtgatggatactccatttgccctgatgtgattattatgcatttcatgcctatgtaaaagtatctcacataacacattaatatatacacatgtacccacaaaaattaaaaataaaggagtaaaaaagtaattttttaaataattttatactgcatgtaacccatgtacaagtagtgccattaccttgtaacaggatatttccaattcctccctctctccccctcccctttttttttttgccattgctgtcatgttttttttttttgtccatgtggtataatcatccaatacatttattcttccttttatcacatagatccacatttttgacctatataattttctttctgtctgaagaactacttttaatctttctttcaagccagatatgctggcaatgatttttcttggtttttgcttgttttggaacttgtgtgattaaggaattataatgagaaagtgatgggggcaagggtgtattgggccttgtaagtcttgggaagcagtttgaattttatttaaattttagtgaaaaggttttggtctggagttttcatgtaatctaatttattttccgaaaaaaaattaaataaattggcagctttgtgaacaatgacgtagattgagggaagaagactggaaatagaagatgggttaggaggcttttacagtagataagagcattgtttggactagagtggtagtagtagtagacagaaaaatggatagatgtgagtcttattttggaagtgggtctgacatgacttgctgatgtgaggagtaaagaagtggaggtgaatcaaggatgatatccaggtttcgtgttcaagtaactttgtagaagatagtggtgttatttactgaaatggcaaatcgggactggaaacaagtttggaggagacattaggaattccattttggtcatgtttcatttaagatacgataagacttccacatggaaatatcaagtagagaggtgaatttcagggcaggaatttagagaaggtatttgagttgggatagaaatttggaagactgttagcctgcagatggtattttcgtccatgacaatgacagacattacttagagtgtgtgacaagggaaaaggtcaggatctgaactcagggaatttctaacatttagaaatcaggtagaggagcagcaacctgagaaggacttgaaggattgaccacagaaagacatctggaatatgtggtgtgttggcagttaaggattcatcgtgcagtctggaagagtaaagacctggcttgtaacacattctgcatttttagaaacaaaatatacaaagtgagaaaaaaaccttcagaggacagatgaatgtcgcttgggttttaaaaaggaagggtgttaacatgcataacagaaataaatgatggctagctaattacactggtccaggagtatggttattctttattttgatattcttgaaatttttgattttttataaagttggaaagtaattactttttaaaagatacacatgtaacttgaagctagactcattctttttattgccaagagtaatggtgttagtgtcacctaatggcaaaatggaatattgcagctatacttataggctataatgaaaaggtaacctaattagaaagaaaaataacatttctggggggattttaggcatggatcagtagacttactatggcttacaaggtcccgtgttctttagccctagcctgcttgtcctgcccctctatcacattactcatttggtcactgagcagattgtgtaatagtagggttcttttttgtctttcaggtttaggctcagatattttcctctcagagagctttttcctaccaccttaatttgtccgtatacttcccatagctactgtttgtcacattaacgtgtttattgtttgcatagcctttagagtgacttggaatcaccatttgctccctttttatttgttttcttactagtatgtaagccccagaagtgcaggctacttgttttccttattcacttaggtaacctcagggctgagttgtgtctgttatatagtgtatgtctgcagttaaacttagttgtgtgagtacatgaacttctggatatgatagtgagtgttgtttctatgctgtagagatctatccagaaaacagaattacactgtgtttgattactgaaacattatttgctacgtgaaggcaatatagaagcttttttctttttctttttggtgttaataagtgataatgtgtcaggaaagagaagctatatgtcttaggatgttgaattctgtattagtcaactttagttactcagaaaaaatatttgcaggtacaatattcggtcttgaggagataagtttttttttgaagcatttagatttaattaatatagcagtgtcagtgaatatggttttgtgtctgtgtgtgcatttgtaggtatttctagtatcatttaattatttcctctattaaaaagaaaacagtatttctaagagaaatgagagtgagtgtgtcaggtaaacagtgataaatctggttgagatatggactggtttgtgtaaatttttaggtaacaatatggctctattagtctggaaacttaggatgaagagagagtacatttccattaagtggctcagtccaagaaggtagcctccctaactttgagataattatctagccagcaggattcttcttcacataaaccatttttaaagctttattagttcatgtttttaattagttcatgtttttaatcagtaggtttttttttttaatcccttttgtttttccaggtggttgtgggaagagaagtttgcagaactgaaatggaggtcagagcttcattacagaaggttagtggatcatctgattctgtggctacaatgaacagtgaagaatttgttttggttcctcagtatgcagatgataattctacaaaacatgaagaaaaacctcaactgaaggtatttttttcttttctacatatggtataatttttaattaaaaactatttgaaacttaggagatgtgtaaaatgcaaaggtttttctcaagtgctgactttcaaaataaaatcaatgtttgatttatccagaccctaattatttggtttgtgtattttaaaaagttcttgcttttggttgtttaccttttgatttggaattttagggggaagaataaaagaagaaaaagaagagaaaggattttttggtgaattagacataatggttaaattttacattactttatctggatgtttttgtttctcttactgctgggttttagaagttaattaaatgttttgctttcacttgagagacttttttctttatgatttttatgttttaaatcagctggtaacgttccgttgtgtgatttaacagtcgacttgtctaaatgtttttaaagcatatcttatatttttagcatttgagtttttatttagatatggtccctttttcacttctgtgttgcactttctaagtcaaagaaaaggaagcaagtaaactcagttatataggcttgaaaatggtataactgtcttctagaaacaggaataggaaaagtagttaaaagtgctatatattacttatgacttttatttagtattaactatggcatcaaaagtgtattaatatatcagtctaataaaatatattctgaaaatgagattactaaatgtttatgttgagaatatattgttttataattttatttaaataatcagtggctttatttttagatacctgtattttagcattattgtgtttaagacatcacttatttgcttaggctttgtgtttcacctgcctttgagaaaactatgagtcaacttaagtgtaaggaaattagcaatattcatcttgggagctagccaacaatttgtaaagaaatcagaaatatggttatgctgtgctaacaagaaatataaccttttaaatgatattcataatagacccgatttaaatttacctattttttcctttagacatgtaaatttaaggttatctgatttttagggtgtgttcctaaaaaagaaaaagaaaaagaagggccaggcgtggtggctcatagcctgtactcccagcactttgggaggccaaggtgggcagattgcttgaggtaaggagctcaagaccagcctggccaatgtggggaaatcccgtctctacaaaaaatacaaaaattagctgggtgtggtcgtgcacgcctgtagtcccatctacttgagaggctgaggcatgagaatcgcttgaacccaggaggcgaagtttgcaataagctgagattgcaccgctgcattccagcctgggtgacagagtgagactctgtctttaaaaagaaaggggaaaaaaagataaatacatctctgtaaataggatcttatataaaatgtagttggaaactgtcttaagtgttttataaagaatccttttgtgaaactaataatcttcctctaatttagttttataaccaggattttaatgtattatatatgtgaaacaacttcttagtattttagtaactatatttaaatatttagattgttttaatttcttctagaaatgaaatactttcataaaatttagcttcagaactatggtagaattgaaacagaattgtcttgctgtgtctgtagatagtttctaatggtgatgaacaattggaaaaagccatggaagagattttgagagattccgagaaaaggccaagcagtcttcttgttgattgtcaaagttccagtgagatttcagaccattcgtttggagatattccagccagccaaacaaataagccatctcttcagttaattttggatccgtctaacacaggtactgtattgaattcttagaaactattaaagaaatgggataaagtaatagtgaaaattttaagatgaaaatcagaaaaaattgttagctcttctcaagctttcagttcttgttgagagtttccacttcggtgttatgtttctgcctatatctctgcctataaaaatcaggtcttaatgttctttgggaacaaagactatgtctgggtcctcattttacccctagtacttcatgcatggtaggtcctcaacagatacttactgaacaaatgagtaaatacttgggtgtcacagaatagtgtaatggagatagtctttcatgtgatgtgcctttttgctcagtttcactacacttatttaaagttatatttagtaaaaactctaagtaaaacatatcaattccaacagtgtattaaataataaatacatctatgaataattaggatttgtactttgaatactagcttataagtcaagatgcttttgggtgcaaaaataaataaaaccaaaaccagctccaacttcagctggcttaaacaccacaggtataatttgatctaggctctgatggtgtttttttggtaactactcagctctgatcttgtctatgttacctttctccttagctggttacaaagtagctaccagcagaaactggtaggtaagggaaggtgacctgtttgtgcctggtggcaaagagaaagtcttcattcttttactgatttttaaaatttctttggtgacacgatctcattctgtcatccaggctgaagtgcagtgatgctgttcagccttctgagtagctgggtgtgtaccaccatgcctagctaattttttttttttttttgtagtgatggggttttgccatgttgaccaggccggtcttgaattcctggcttcaggtgatctgcccacctcagcctcccaaagtgtcgggtttaccagtgcaagccattgcacccatccctggcctgttttacggattaaataaaagttctgagttttactctgattggaccagtgaaaccattttctagtagtgagggaaatgacatgaactgatagctgtaggcctgggttacattcaaacctgtaaataagtcactctgacagaggggatgggattatcctaattggcttaggaaactcgtgattcatttctgaaccaaatgaaccttggtacagggtaagtataggtatagccaaactgttacacaatagggctgtgatgcatttatgtagggaatgtaatcacagtgccttccatggcaaggatgattaagcattagaaaaatctttcagtgtggtttaccacataaagtggtgaagagtgaaaaagtatcagtagataaagaacaagcactggataaaatttaaaattttacatgtatatgcacatgtaaagttcttggaaaacttagaaggaaacttgcttaatcaaatatctatcaaagtcttatgttttatgctgaaatttaaaatgcgttaccatcaagatatattgaaacaggagcagttagggcatgatagctatcaccatagctctttgacgttgtactaaagaatccagccaatgcaagatgacaggaaaaagaaatgaagtgtgattagaaaaaaagtgaaaaaattctcatgattggtaaagtatttaagaaagtgaatggataagctattagatttaaagactttttgccaggcatggtggctcatgcctgtaatcccagcaatttgggagggtgaggcgggcagatcacttgaagtcaggagtttgagaccagcctggccaacatggcaaaaccccgtctctattaaaaatacaaaaatggctgggcggggtggctcaagcctgtaatcccaccactttgggaggccaagatgggcaggtcacgagatcaggagttccagaccagcctggctaatatagtgaaaccccgtctctactaaaaatacaaaaattaactgggtgtggcagcacatgcctgtagtcccagctactcaggaggctgaggcgagagaatcgcttgaacctgggaggcagaggttgcagtgagccaagactgcaccattgcactccagcctgcgtgacagtgagactctgtctaaaaaaaaaaaaaaaaaaaaaaaaaaaaattagctgggcagggtggtgaacacttgaaattccagctgctcaggaggctgagacagaaaagtcacttgaacccaggaggtggaggttgcaatgaactgagatcatgccactgcactccaacctgggcaacagagtgagactccatctcaaaaaaaaaaaaaaaaaaaagatttaacgacttttaggaaggttagcaccaacagtagaaaataaaattgccattcataataccaacaaaaataataggtaacaaggaagaaacaaaaatttatgtaaaattttaataaaattataaaatgttattgaaggaaatgaacacctgaatgaatggggagagatgccatgttgattgataggagtcaaccttgaaaagatgtaacttatctccaaattagtctgtaacttgggtgggaatttcaaattttcagttatttttataaacattctgaaatgtatctggacaagtagaggtacacaggtagctaagaaaatttttaaaaagaatattatgtattaagatagactacagagttacagtgattaaaccaatgtgatattggcttgttatagaagtgaatcactagaacagggtaccagaaacaaacctatgtatataaaggatttcagtatatgacagaattcgcttcacataccactgggggaaatggtaactatgcagtaaatagtgttgggacagttgcatctttgagtgcaataaaataaaattaggttccttagttgtacataaaaattatttttagtgaatcagatatttaaagtgagaaataagcctgtaagaagaaaacaatggagcatatttttgtgattgtcaaggtaggaaaagccaaatcacaaaaggaaaagatagttgcatatcattatagaaaaatttaagtctggcctgggcatggtggctcacacctgtaatcccagcactttgggaggccaaggtgggtggattacttgaggtcaggagttcaagaccagcctggccaacatggtgacacccggtgtctactaaaatacaaaaattagccgggcatggtggttcatgcctgtaatcccagctgagaatctgggcaggagaatggcttgaacccaggaggcggaggttgcagtgagccaagattacaccactgcactccagcctaggcagcagagtgagactccatctcaaaaaaaaattttaaatctgagtgcaaaagaccatttaggttatctatttcttcttgagtgtactttggtgttttcatctttcaagtaattggttaatttcacctaagtatggggatagagttgtttctctgttatagagtaatattctcttattatccttttaatgtctgcaggatgtgtattaatatcctctcattcctgatattgacatgtattacatatacatacattgaaaaacctaccagtctaataattttgctttcaacagccatacgtatatttccttgagcactttaaaaatgcttttccagtgtcttcttgtctccattgtttctgataacaaatctgaagggatttgaatcattgttctcctatttgtaatatgttatttttctttgctttcagtacttttatttcattgttttcagcagtttgattatctgtgtgtggttttctttgagtttatcttttttttttggatcactgagattcttgaatctgtaaatttatatctttaaccaaatttgggagttttcacccattatttcttggtaattgttttgtttctacactaatctctttcttttctgggactcagtagacaaaaatggtagacatttccataccgttctcacaattccttaggctcttttcattgttttccctgtgttcaagctcactgactttttactttgttaatctccattctgctattgagatcgtctgatgaatttttaattttagatattgtatttttctgtttttaaatttacattgttttttaaagtttttttgtttctctgtggatagttttgatatttttattcattacaggtgttttcacgtttattttatggattatttatggagcaactgggacatcttgggattggtctgtggattattttttcacttgagaatagatcacccttttatgtttgttgagtaattggcttgttcccagagttttcgaatcttatgttttgagactatttcttgttaaaatcctctgaagaatgttgactttttttttttttttttttttaaagcagacattccacctggttgtgtccaaactgcaagatctgtcttgctttctggttccaaagtattttcaattctcaaaacctttgctgtgcttcttcagtctgttccacatgcatacacagtttgctagtttacacgcagagttaggggattatcttcttcagctctctcctctctgagatttccccacactctctggcttccttgggccattttccttctacccctgtgttagaaagacaggtttctttcttagagtttttgctgctttgtgctgttttgcagaatcatatgtctggagcactttatgacaaagtggtgagagaaaagagagggaaaaataatagagtttttcttttccatttttgggttataggggcctctttgctttggtattttagcctttgagacacatttcttttcctccagattgtagatgcttacagtaccaccgcgactaccagcatttcaggtagttctgtggtcggggctagtggtagaactgggagagaaaacaaaacagaaacaagtcatgatttctcagatactctctagtttgcagggacttctttttctgttatttggctggaaagattggatttctttgttttgttgctcactgctattctgcaactcggaccacccttaggtcaaaactgggaggtgatgatgagaaaaatggaaaactcaccactgtaatagaggttcagattttcactttcctctccactctggctgttcctatttactttttaaaaggaggctggatgtggtggctcacgcctgtaatcccagcgctttgggaagccaaagtgggcggatcacttgagctcaggagttcaagaccagcctgcgcaacatagcgaaacccaatctcaataaaaaaagaaagaaagagtcctccggtcgttgctttttatattctgtcgaaagttttcaggtataatctgtgggagagataacttataacagtaggagagataaattgtaacaggcttatcacttcaatttcactggtccagttcaataatcttgagtctgtttttgcttcagctgttttgaagttctgctattaagggcatagtcacttagaatttttgtgttttcttaatgaattgaccattttagccttgtgaaatatccgttttctttttgttaaaattccttgtcctgaagtctagtttttcttatattaatatagccacttttggtttcttatgattagtatttgcatggtatatatttttctttttcctttttttttaaaaaaaattttcatctatttttatctttaaagagtgtttcttgtagatacctttttaaaatccagtttaacaatctcagtcttttagttgggtttagactaggataagtaaactactatctgtgagccaaattccacttcctacttgtttatggtgtggcttgcaaagtaaaatggtttttacatttttaaatggctctaacatatcaaaaggagaataatattgtgacacatgaagcttatatgaaattcaaattttagtatccataattaagttttaagttttgtcaaaaaatctgtggaaggtttttttctcacttgtataaatacttgcataatattgtagattttgtctcttggcccaccaaacctaaaatatttatcatatgaccctttacagaaaaagctgaccatttacttttttttttttttttttgagatggagtttcactcttgttgcctaggctggagtgcaatggcacgatctcagctcactgcaacctccacctcctgagttcaagcaattctcctgcctcagcctcctgagtagctgggactacaggtgcatgccaccatgcccagctaatttttttttttttttagtagagatggggtttcaccctgttggccaggatggtctccatctcttgacctcatgatctgcctgcctgggcctaccaaagtgctgggattacaggcatgagtcactgcgcccagctgaccatttacctttgatgtaattttaaatatatttggatctaagtgtacttactctcttgctgtttttctctgtctcttctgttcttgtttttcccctcctttcctgcctttagattatttttaatgttctattttatctccattattggcacattagctatataattttgtcttattattttagtatttgctctggagtttataactcaagtctttaactcatttacattctaataatgtcataacactttatgtacattgtaaggatcttttgttaccttctagattttatgcttctgctctcattcattttgctaatacatatgttagaagttctacaaaatactgtggttttttttttttttgctttagtctgttatattttgaagaaattaaagagcaaggaataggtctttttctcatatttaacttctcgtgctcttcagttttctatcattttcctgtagcccaaggaacttcctttaacattcctcttctgcaatttagaaactgctgttatattcacctggggaatattttactgcagatcttgtattttttcagctctagaatttcttttggttcttttttatgtctttcatttttcttcttattttgttagatgtttatctttaaatccttgatcatatttataatagtcgtataggccttctttgcctattttatcatttcttatttttggatcagtttctgtactgttttatatttggaatctgtagagtcatgaatcttgggttacacaggtttataaaatacctcttcaaacaacttctttttggcctcctcttttctctttttatttatattattttttgttgttcctcactggttcacattcatcttatattttttctgtttttaagactctagttacacatgttagaccacttgaactacgtaatcacccaggctcatcagtcttattgttgctgcataagtgcttgttacattaagaaaagtatgtaaaaacatacatgtatataataatataatacaaagtaatttaaacatattaaaatgtatttgtagttttttatttatcccttttgaaatacattatattgaactgactgaaaaagggagaaaaacatgtttcagtggttgaagaacatggtagatgaagtagttcattttgaatggctttagttccttaacaaaaaagtcagtggtgaagttgcatattttagtataatatttaggagctgcagttggggaatttgaaatggcttttgtgaattatttattaaaatcctatcctacaagaggaatcctggtaatggcagtctgaaaatgttgcaaggacctagttcaagtgatacatgtatgcttaattttgtgcggcatgaatgtaggtaacagcggggaagccaagcagaatgtggattttaggtaggggcatgaagggagaatgttatactacctgatacacggagatggatgctctctaaccacaattggacctttgctgcctgctgttcttagaataaaatgaacagttttttttttttaaagaaattcattatgatggggatggaattgggcgaagcaatcgtagattcattcatcaaaaataattattttgaggaaaaaaattccattggaatacttatatagttcattatagttcatagaagccagcaagccaggaatgagggaaataaggagcttgacacttgttgttggtatgagatgtaacattttaacattgcttgtttttgcttaggaagttaggctgcttaataaatgtggtgcagtgaaggatctttacagtcaagataaacttttagctgatttacttttgtttaatcctcattattttggggctaattcacagtatctttagtatagtttttcctccttattgttctatatcacttgttaaccaaaaagtggcaggtctcaatccatagaggtttacttagtcaagggtttagtatgtgcctgggaaaaacaagccacaggaacagttgtgacctgtgcttttctagaggggttttgggaatttcggtgtttaaacggggaaagggcaagcacaggttaaaaaagagggaaaggtaggcagtgaggcaaatggttgcattcttgtgaggctctgactagcctcaataaatctacactttacatgtgaaaagagggagtagaggaaaaagtcatttgggttggttccaagtctttgctattgtgaatagtgccgctataaacatacatgtgcatgtgtctttatagcagcatgatttataatactttgggtatatacccagtaatgggatggctgggtcaaatggtatttctagttctagatccctgaggaatcgccacactgacttccacaatggttgaactagtttacagtcccgccaacagtgtaaaagtgttcctatttctccacatcctctccagcacctgctgtttcctgactttttaatgatcaccattctaactggtgtgagatggtatctcattgtggaaccaacccaaatgtccaacaatgatagactggattaagaaaatgtggcacatatacaccatggaatactatgcagccataaaaatgatgagttcatgtcctttgtagggacatggatgaagctggaaaccatcattctcagcaaactatcgcaaggacaaaaaaccaaacaccgcatgttctcactcataggtgggaattgaactatgagaacacatggacacaggaagggaaacatcacacaccggggcatgttgtgaggtggggggaggggggagggatagcattaggagatatacctaatgttaaatgatgagttaatggatgcagcacaccaacatggcacatatatacgtatgtaacaaacctgcacgttgtgcacttgtaccctaaaacttaaagtatagtaaaaaaaagaataaaaaaaaaggaagtcaattatgcattcgtcttagtgtaggtgaagggacgatttctggtcttgtcctgtgtctgtgaagataagctgataattgacattgtgaggatgagatttgacagaactcagctttagagctagtttatagggaggatacatatcttaaatgatttaggggctcacacggaaattccttgtgagtaatctgtgagggaagccatctggggagatatgtgcccttctatcgttgtgggaacctggcatatggataaggctatgacacagggttgtgaatttacagctatctgggaacaaaaagaaggcagtatggtgtgactcggttcccaagcttatcttttgctttggcatagtcagtttggagaccagaggttctgttgttcttttacatacttgtactctatctttttgagttttttttaatataaagcttaaattttttctctcatctgaagaacttacagctaagtaagataatattttgagagattcaaaagtatgaaatggctggctctggaactctgacataagatttaggattataaaatcctagaatcctagattttaaatcctaaaattttaaaatataaaaggagtgaaaatacagagagacctagattttgtttgaaatatttcatttctttttgggcattggcaagattataatgatggtggagttttgcaatgacttttgagtgtttctttttttgtttcttcagaaatttctacacccagaccatcttctccaggtggactacctgaagaagatagtgttttatttaataaactgacctacttaggatgtatgaaggtttcttccccacgtaatgaagtagaggctttacgggcaatggcaaccatgaaatcttccagtcaatacccctttcctgttaccctgtatgtaccaaatgttccagaaggttctgtgaggtaagctctaatttgtttttctttagacacatattaagtcttttgggtggtggtgaagatgttatagcatcatcaggtgtagaacttactgtgaactcacactgtagacatgcagagtaaacatgtttaggcttagactgtgttcattgtttgaaaggggcatttgaacaattgtattagtctattcttgcactgcaataaagaaatatctgagattggataattgataaagagaagaggtttaactggctcttggttctgcagggtgtataggaaacatgatgctggccatctgctcagcttctgggagggaggcctcaggaggggaggcctcaggaaacttaaaatcatggcagaaggcaaggggaagcagaattgtcttacgtggcaggagcaggagcaagagcgagaagggggaggtgccacacgcttttaaacaaccaggtttcatgagaacagctatcatgagaacagcaccgaggggatggtgctaaaccattcataagaaattgttcccatgatccaatcacctttcaccagccccacctccaacattggagattacaatttgacatgagatttagacggagccgcagatccaaacccatatcaacaattacgcttagaatattataaatagaaataaaacggtaaaaatacttgtaatatttatttctctatcctgaatgagcataaaaatctgccttcagcttctgaagtaatagtggttgaaagaaactggagtgagccatagattttaagttatttacattagactggaaagaagcaaaatggctttttcctcttatgcttaattaggaataatacattacctcagctgaacctttagtttctttaaatgtaagtcagggccaggtgtggtggctcacacctgcaatcccagcactttgggaggctgaggtgggtgaatcacttgaggtcaggagttcgaaaccagcctgggcaaaataatacaaaaatttgccacgtgtggtggcacacgcctgtaatcccagctgcttgggaggctgaggcaggagaatcgctcaaactcgggagatggaggttgcggtgagccgagatcatgccactgcactccagtctgggtgacagagacccccatctcaattaaaaaaaaaaaaaagtggccgggcgcggtggctcaagcctgtaatcccagcactttggaaggccgaggtgggtggatcacgaggtcaggagatcgagaccatcctggctaacacggtgaaaccccgtctctactaaaaatacaaaaaattagctgggcatggtggcgggcgcctgtagtcccagctactcgggaggttgaggcaggagaatggtgtgaacccaagagatcgtgccactgcgctccagcctgggcgacagagcaagacgccatctcaaaaaaaaaaaaaaataagtcagataatgttattctcctacattcggcctttccctcagtcacacttgtggttatatttgaaatccttatcatggttaggcactgttgacctactgctccaacttgttcttcccctcttcgtccttccttcttttcttcttagcctgtttgggctgctgtaacaaactgccatagactggtggtttacatacaacagataattatttttcacagttctcgtggttgggagttcctagatcaaagctccagcatatttggtgtctggtgagggcctgcttcctggttcatgtgttcttacatggtggaagagagtgtaagagctctctggggtttcttttataaggatactactcttattcaagaggactcccttctctctctctttctgtccttctgtctccctcctcccttctctctcttcattcatcaaaagaagatgcagatttgtgtgtatgtgtgtaagatgtgcaagaatatgaagataatttttttttttattatactttaagttttagggtacatgtgcacattgtgcaggttagttacatatgtatacatgtgccatgctggtgcactgcacccactaactcgtcatctagcattaggtatatatcccaatgctatccctcccccctccccccaccccacaacagtccccagagtgtgatattccccttcctgtgtccatgtgatctcattgttcacttcccacctatgagtgagaatatgcggtgtttggttttttgttcttgcgatagtttactgagaatgatgatttccaatttcatccatgcccctacaaaggacatgaactcatcattttttatggctgcatagtattccatggtgtatatgtgccacattttcttaatccagtctatcattgttggacatttgggttggttccaagtctttgctattgtgaataatgctgcaataaacatacgtgtgcatgtgtctttatagcagcatgatttatagtcatttgggtatataccgagtaatgggatggctgggtcaaatggtatttctagttctagatccctgaggaatcgccacactgacttccacaatggttgaactagtttacagtcccaccgacagtgtaaaagtgttcctatttctccacatcctctccagcacctgttgtttcctgactttttaatgattgccattctgactggtgtgagatggtatctcatagtggttttgatttgcatttctctgatggccagtgatgatgagcattttttcatgtgttttttggctgcataaatgtcttcttttgagaagtgtctgttcatgtccttcgcccactttttgatgggattgtttgtttttttcttgtaaatttgtttgagttcattgtagattctggatattagccctttgtcagatgagtaggttgtgaaaattttcttccattttgtaggttgcctgttcactctgatggtagtttcttttgctgtgcagaagctctttagtttaattagatcccatttgtcaattttgtcttttgttgccattgcttttggtgttttggacatgaagtccttgcccacgcctatgtcctgaatggtaatgcctaggttttcttctagggtttttatggttttaggtctaacgtttaaatctttaatccatcttgaattgatttttgtataaggtgtaaggaagggatccagtttcagcttcctacatatggctatccagttttcccagcaccatttattaaatagggaatcctttccccattgcttctttttctcaggtttgtcaaagatcagatagttgtaggtatgcggcattatttctgagggctcttttctgttccattgatctatatctctgttttggtaccagtgccatgctgttttggttactgtagccttgtagtatagtttgaagtcaggtagtgtgatgcctccagctttgctcttttggcttaggattgacttggcaatgcgggctcttttttggttccatatgaactttaaagtggttttttccaattctgtgaagaaagtcattggtagcttgatggggatggcattgaatctgtaaattaccttgggcagtatggccattttcatgatattgattcttcctacccatgagcatggaatgttcttccatttgtttgtatcctcttttatttccttgagcagtggtttgtagttctccttgaggaggtccttcacatcccttgtaagttggattcctaggtattttattctctttgaagcaattgtgaatgggagttcactcatgatttggctctctgtttgtttgttgttggtgtataagaatgcttgtgatttttgtacattgattttgtatcctgagactttgctgaagttgcttatcagcttaaggagattttgggctgagacaatggggttttctagatatacaatcatgttgtctgcaaacagggacaatttgacttcctcttttcctaattgaataccctttatttccttctcctgcctgattgccctggccagaacttccaacactatgttgaataggagtggtgagagagggcacccctgtcttgtgccagttttcaaagggaatgcttccagtttttgcccattcagtatgatattggctgtgggtttgtcatagatagctcttattattttgaaatacgtcccatcaatacctaatttattgagagtttttagcatgaagggttgttgaattttgtcaaaggctttttctgcatctattgagataatcatgtggtttttgtctttggctctgtttatatgctggattacatttattgatttgtgtatattgaaccagccttgcatcccagggatgaagcccacttgatcatggtggataagctttttgatgtgctgctggattcggtttgccagtattttattgaggatttttgcatcaatgttcatcaaggatattggtctaaaattctcttttttggttgtgtctctgcccagctttggtatcagaatgatgctggcctcataaaatgagttagggaggattccctctttttctattgattggaatagtttcagaaggaatggtaccagttcctccttgtacctctggtagaatttggctgtgaatccatctggtcctggactctttttggttggtaaactattgattattgccacaatttcagctcctgttattggtctattcagagattcaacttcttcctggtttagtcttgggagagtgtatgtgtcgaggaatgtatccatttcttctagattttctagtttatttgagtagaggtgtttgtagtattctctgatggtagtttgtatttctgtgggatcggtggtgatatcccctttatcattttttattgtgtctatttgattcttctctctttttttctttattagtcttgctagcggtctatcaattttgttgatcctttcaaaaaaccagctcctggattcattgattttttgaagggttttttgtgtctctatttccttcagttctgctctgattttagttatttcttgccttctgctagcttttgaatgtgtttgctcttgcttttctagttcttttaattgtgatgttagggtgtcaattttggatctttcctgctttctcttgtgggcatttagtgctataaatttccctctacacagtgctttgaatgtgtcccagagattctggtatgttgtgtctttgttctcgttggtttcaaagaacatctttatttctgccttcatttcgttatgtacccagtagtcattcaggagcaggttgttcagtttccatgtagttgagtgattttgagtgagtttcttaatcctgagttctagtttgattgcactgtggtctgagagacagtttgttataatttctgttcttttacatttgctgaggagagctttacttccaactatgtggtcaattttggaataggtgtggtgtggtgctgaaaaaaatgtatattctgttgatttggggtggagagttctgtagatgtctattaggtctgcttggtgcagagctgagttcaattcctgggtatccttgttgactttctgtctcgttgatctgtctaatgttgacagtggggtgttaaagtctcccattattaatgtgtgggagtctaagtctctttgtaggtcactcaggacttgctttatgaatctgggtgctcctgtattgggtgcatatatatttaggatagttagctcttcttgttgaattgatccctttaccattatgtaatggccttctttgtctcttttgatctttgttggtttaaagtctgttttatcagagactaggattgcaacccctgtctttttttgttttccatttgcttggtagatcttcctccatccttttatttttgagcctatgtgtgtctctgcacgtgagatgggtttcctgaatacagcacactgatgggtcttgactctttatccaatttgccagtctgtgtcttttaattggagcatttagtccatttacatttaaagttaatattgttatgtgtgaatttgatcctgtcattatgatgttagctggtgattttgctcattagttgatgcagtttcttcctagtctcgatggtctttacattttggcatgattttgcagcggctggtaccggttgttcctttccatgtttagcgcttccttcaggagctcttttagggcaggcctggtggtgacaaaatctgtcagcatttgcttgtctgtaaagtattttatttctccttcacttatgaagcttagtttggctggatatgaaattctgggttgaaaattcttttctttaagaatgttgaatattggcccccactctcttctggcttgtagggtttctgccgagagatccgctgttagtctgatgggcttccctttgagggtaacccgacctttctctctggctgcccttaacattttttccttcatttcaactttggtgaatctgacaattatgtgtcttggagttgctcttctcgaggagtatctttgtggcgttctctgtatttcctgaatctgaacgttggcctgccttactagattggggaaattctcctggataatatcctgcagagtgttttccaacttggttccattctccccatcactttcaggtacaccaatcagacgtagatttggtcttttcacgtagtcccatatttcttggaggctttgctcatttctttttattcttttttctctaaacttcccttctcacttcatttcattcatttcatcttccattgctgataccctttcttccagttgatcgcatcggctcctgaggcttctgcattattcacgtagttctcgagccttggttttcagctccatcagctcctttaggcacttctctgtattggttattctagttatacattcttctaaatttttttcaaagttttcaacttctttgcctttggtttgaatgtcctcccgtagctcagagtaatttgatcgtctgaagccttcttctctcagctcgtcagtcattctccatccaggtttgttccgttgccggtgaggaactgcgttcctttggaggaggagagacgctctgcgttttagagtttccagtttttctgttctgttttttccccatctttgtggttttatctacttttggtctttgatgatggtgatgtacagatgggtttttggtgtggatgtcctttctgtttttagttttccttctaatagacaggaccctcagctgcaggtctgttggaataccctgcagtgtgaggtgtcagtgtgcctctgctggggggtgcctcccagttaggctgctcgggggtcaggggtcagggacccacttgaggaggcagtctgcccgttctcagatctccagctgcgtgctgggagaaccactgctctcttcaaagctgtcagacagggacatttaagtctgcagaggttactgctgtctttttgtttgtctgtgccctgccctcagaggtggagcctacagaggcaggcaggcctccttgagctgtggtgggctccacccagttcgagcttcccggctgctttgtttacctaagcaagcctgggcaatggcgggcgcccctcccccagccttgctgccgccttgcagtttgatctcagactgctgtgctagcaatcagcgagattccgttggcgtaggaccctccaagccaggtgtgggatatagtctcgtggtgcgcccttttttaagccggtctgaaaagcgcaatattcgggtgggagtgacccgattttccaggtgtgtccgtcacccctttctttgactcagatagggaactccctgcccccttgcgcttcccaggtgaggcaatgcctcgccctgcttcggctcgcgcaccgtgcgcgcaccaactggcctgcgcccactgtctggcactccctagtgagatgaacccggtacctcagatggaaatgcagaaatcacccgtcttctgcgtcgctcacgctgggagctgtagaccggagctgttcctattcggccatcttggctcctcttcgataatttgtttacttgcattgttagtaccactttcctctccctttctctgtcttcattcactacattccagttatactagcctctgtattcattcttataggacttaccagtcatatttcccgccccaggaccttggcatattatctttatactccctaagtaaatctttccctgattttccaatgctttttgtttcatcttagtaaacattttatcataagaagccttccttggttatatcatgtaactctctttcctcatactgggccatttttttttccttcgtagcacttttctttgaattgatattatatttatttgcttattggtttattggatatcttcctcactagattataagcttgtgagaatagtttctttatatttttccctgctgtagcttcagtggctagggaagtaagtgattcattgtaagattttagcaaatatttgctgaatgaacaaataagcagaccaggtcaaggaaatgaggttgaatttgtctggagcctggaatattctctgaaagttgctttaatcttttaaaaaccctttctgatttgcctcattctctaaagtttagaatgtgggaaaacttttgctaaattccaagtaccaaaatattggcaatataaatttagaaaattttggtaaaaatgctttgaatttttcaggaaagggtttgcatgtatattgtttatatgttatcgtctaaaaatgtcaaaatgtctttttaaagaaaaattgttttcaaagtgtcttctatgctatctgtttagcttcaatttgccaaacacaccttgacagagatttagtgttttgacttgcctctttattcctggggttgtccccttaccctcagtttctaaatttgagatcttgaaggggtcttgaatgtgtagatcagtccaggacttaggatttgttttgttttgttttgtttttgtttttgtgtttgtttttgtttttgagacacagtttcactctgttccccaggctggagtgcagtggcacgatcttggtgcactgaaacatctgcctcctgggttcaagcgattctcatacctcggcctcctgaatagctgggaataccggttcccaccgccatgcctggctgatttttgtatttatcagaagagatgggatttcaccgtgttggtcagactggtcttgaactcctgacctcaagtgatccacccatctcgacctcctaaagtgttgggattacaggcgtgagccactgcgcccaaccaggacttaggatttgtgtagggaaagtcagataattatttgcttccaaatcccagactcctttcagcttttgtattccgttgttgaattcatctttggaaccacctgaccttttctgtggtagaaagggcctcagttgaacaatgaattagggcttagataaactaataggtgctgctctgtatagaagtgggctctccaggaatagtctatactattctagattggcattccttttgccataattgaaaaagactagatttagggatgggtgatagagatgttaccaggcacgtatacttagctttggagtaaatgagttggttcataggaaacacaagaatgaagaaattgtgagaagataataaagaatttatgtgtatgtgtgtgtttgtgtgtgtgtgtgtgtgtgttgtgaatatgaagacaagttgttctctcttgcattgttagttccagtttatttttgtgatttttaagatagttatgtttggccagatgcgggggctcacgcctgtaatcctagcactttgggaggccaacgcggggggtcacctgtggtcaggagttcaaggctagcctggctaacatggcaaaaccctgtctctacaagaaatacaaaaattagccgggtgtgatggcaggcacctgttatcccaggtacttgggaggctgaagcaggagaatcgcttgaactcgggaggtggaggttgcaatgagccaagatggggccacttcactccagcctgggggaaagagcaaaactctgtttcaaacaaaacaaaacaaaacaaaaaagatagttattttatatatcatatattgtcatagtaaaactatttgttctttttttttaaaaaaaaaaacctaactggaaatatgtctttgttcttcgagaattaatattttatctaacttttcattactgttctacagaattatagaccaatccagcaatgtggagatagcatcttttccaatctataaggtgttattctgtgcacgtggacatgacggaacaacagagagcaattgctttgcatttacagagagttcccatggttcggaagaatttcagatacatgttttctcctgtgaaattaaagaggcagtaagtataatatagtatagcaatttgctatagagatgaattagggtaatatttttgagctctaatttcactgttgtataaatatgttacataaatttggagtatgtttctaaagacaaaattaatatttgtaatgacatagaactgaatgtggaaagccaagtctggtatatctgcataggtagggcactctcacagcttagcagttgtcgtagaaaaatacaactggatgagttgcctttccaccttaccatggtagtaaattgcttatgctcagaagggagactatttttgcagctctcttattattttgccctagtagattggtccatgtgattttaaaaagtgcctataacgatacctgtttctctgatgggcttgatagttgcatattgctttcatttagatattgcattaagattattttatcaatctctgtggttttcattgatgattatttgttttgtgctttcttgctcagaggctatattttgctccagagaactggcttaaataaaattacaaatgctcacttaaagcaggtataacaacttgtagtcctttgaaaatgctagtaagtttttttatagaaattactaattggtagattattgttaggagaaatggtttagattaaatgcagttaattacatagggaaatcttttctacatctattgaattatccccaattttaaaatgttgcactgttagacacttagtacttaaaaccatttcaaaggcattcataaatgggtgtggatggcaatgtctcaggtatgtttgcttgtgacaaaataaattatcagcagaaaatgctgaaagcaatagttattctagcctctatcatgaaacatgaataaatcattctattaacaggagttttgagtttatttctggcgacaaaatgggaattaatggaaatatggatttctgtgagtttgatacaaagcatgatggctatgtcagttcttgtgccctggtgatcagtttgctttacactaaactgaacatgcacagacacatataatttagattgtaactgtagaaattctctatcagaacccatgccttctgaaagaagttgaagttttgtgttttgttttttagataaggctttatctatttttttcccagcacttacatatctatgtgtatactgacttcttgttcaaaatggtctgatagacaggagagtgaatgagtataagtatgctgctagtgtgcctagcatatagtagacagtgaatataaatatgctgaaggaatatgtatgtttctgtgaatgaggggggctatttctgatccttacgaactccactacagaggtggggaagcagatggtagaatcctggcatttcatgttggcagccatcatttaacccacctgtgtgatttccgaatcactggagctcaacagcaaggaaatgagctttgaagacctggaaaatctgctgcttggagagagagaaatgctgctgcagaaggatactgaattgctgcaagaagtttccataactaatggtatgaaactgtcttttggattgtagcattcacttgggtttagagtaggggaagtgtttatttttgagagcttatcatggtaggtaagtagtggaagaaaccctgggaagttcttggccagaccattttggatatagtattaaataaatgctgtttctatagagcatattttttccattgcacgttgtaagaaagttatctccatctattatttaattttttgagtgcattttagaaagtattacattatgggggcattagtggtaaaatatattgtttgaaggagaaatacatgacagtggtcattaaaccttattatgagacattatttctttttaaaaaaaattttaaaaatcctcctccaggtaatgaatgacacatcagttctaaatgaggaataacccaatataaatagagagcttatgccaggcactgtgctaagcgttcatttgatactcataacagcccgtgaccaggttggacttattagacaagtgactttatgtttctctttgcctggagcagttctattttatgcttattgtccaggtttttactaataccctcatttttattctcaaaagtgttgtggtttggatgataaattgtttggttaccctttgtttatcctgtggctaagagactgggtgatagagctgggttttaagttgaagtctttgactttgaagagccatacagttttcagtaacaactttcctgttgcttacatattataaaacacaaatgtggatttttgtattttagttatgttttataaagggatttattggtaacatagcttgcattccatttacgttttgtattttacctggcccttttgcagaagatgtccaacatcttcctctctgccctacaaaataattatggttgtaattaatctgaagtcttctagttacatttactggtcatccggttgtctggttcccagaagttttctgttctttgataaacacctttagtcgttagtatttgagtgcctcttgatgggcacaaacagttggcagatagttcaggaaccagctgacaaacattcttactgcttaagtatgtactgtgcagcaatgccacaaatttattttttatttttattttcgcagagttcgtggatgagagctgaagaggtttgtcgttaaaggaagatttctgaagcaggagtagcagcatggctgccactactgtcactgtgatgcttatttcactataaaatccctcaaactgcaggcatcaacaatggtagaagggaatcccagtgagggtgatggccctcttgaacacctgtgacacaaggattgggaggtcccacagaagggttaggacacatttgacttgcaacacttggatgtgcttctgcaggactgtgctttagtagatttcaataatctatggcaaaagagttggacaatccaaccagaagtatcttgaggtcaatgatctttgtataaggagaatgatatgctaggcttctgctgaagaattgcagaccaagcaaggtatcagaaagtgtagtgaaaaaaatacaaggaggcacctgttcttgtcacatctttttggatatattatataaaactttcaaaagatacttttaaagtgttaattgagtctttctaagattttatttctactagccagtgtaaccattctatgcaaagcagattttgatgatatttgtgtgttttaggatactattcagtattagaaactctgttacattatggaagcatgttttttgtcatctggtgttaaaggcattcagagatacttcttgataaatatcaagggcatcattgggaagatacttattcttattgcattgttttttcttggggttgcagatatgacactgtataaaagaaaacgtgttccttgcatgggaaaatttctttttctttgagatggagtttcactcttgttgtcaaggctggagtgcaatggcgtgatctcggcttactgcaacctacacctcttgggttcaagtgattctccagcctcagcttcccaagtagttgggattacaagcatgcatcaccacacctggataattttgtatttttagtagagacagggttgcaccatgttggtcaggctgctctcaaactcctgacctcaggtgatccacctgcctgggcttcccaaagtgctgggattacaggcgtgagccaccacacccagtggagaatatcatttctaaacaagtatttatttaattgttatgttagctaaatgcctcattttggaagataattcgaagttatcttgttagtgttttccttaaatcaattgatttttatgattttaaaaaagtttcctggtagtgtgcctcttattttagctccttcccatgaataatgtatttgagctagctgttttaaaaattttaatacatacctttcaaggtgcctttcatagaatgatttttcacatttatttcttgggtgaactttttatttttttttttgaggcagagtctcactgtctcccaggctggagtgcagtggcgtgatctcggctcactatgatctccacctcctgggttcaaacgattcttctgcctcagcctcctgagtagctgggattacaggcacatgccaccacgcctggctaatttttgcgtttttaatagagacggggtttcaccatgttggccaggctggtcttgaactcttgacctcaaatgatccacctgcctcagcctcccaaagtgctgggattacaggtgtgagccaccatgcctggccttgggtgaacattttcttgatatatggtgtttccaaaagagtgagttatctttcaccagtattaatgaaaagacttcatcttggagaaactagctatgttatttattttaaataaatacctttgttacttaataacagtgtttggacttttaagatgtaatacatatttgagaatttggaaaatattgaaataaaaaagaaaataaaaggtgcttaaaattccgccgcagttaagattttggtgtatctccattccagatatctacatgtgctctcctccctgcctcttcaaaaacaacagcaacaaactcaaacagatatacagttttgtgtttagtattttctatagatactgttttctggagaaagattgtattatttatcaataaaccttttccttctgcaaagaaatgcccattcaagactatttgtgtgtatgtgttttaataagtgtgacatgtattgaagtgtttgccatggtatgtgtttttaatttcctttcttgatgtacagttagcccactatatttgtggattctacatccatggagtcaactaaccatggctttaaaatatttgataaaaatgtatggtttcatctgtactgaatatctatagccttttttccttgtcattagtccctaaaagatacagtataaaaaccattcacatagcatttatattctattaggtattataagtaatttagagattaaagtatatggaaagatgtgtgtaggctatatggaatattacacagttttatataagggacttaaacatctatgcattttggtatctgggagttttggggggtcctagaaacaattccccatgggtaccaaaggacaactgtaattggttatccagtttgttataagatactgatagtcattgtttctgaagtttatcttgttaattcttggattactgtttcagcttattcacagactctagaattcacaatatattttaactcttttggtagaaatggcagcttgtaagacatagtattaaatgcaatttgattgctgttaatgaaattaatgtactgtcgtgttctttctccaaaagagagatagatggaatcttatttttttttctccatcattctgtatcactctggctcagctccatacgcttaacctttctataaagaattttttgaagccttgccagatgctttagaatttgccaagttctttgactttttttgatatggccttctgatgtgacaagctggctgatctgacataaagaatgtgaaaaagaagagatgagaaaggggaaaaaagaataaatatggctggggtttaactaccaatgtatgcaaaattacatacaggtgttctcctgttttcacatacagtgctttcttaaaaatacgcttaagtccgggagtagccagaaagagtcatggcccaaaaccccctaacagcagttagtgtggcatctccacagtggggaatgttgtaggagttattaagaaattattttaggcatatagagatgaaaagggatccttgggaaattttcattttttaaagcatctctggaaaagtttcttgtaaagccccagctcttagagccaggccagcaacctataatatacaaatggtagccattagaaaccgggtccacccaacatggcaattcccagggccttcttgcccttgccccacatgttcctggcaacatggctgcccacacatatccttgcgtgtggagagcatcatggtgccctgcatttgcatatgaaaagctagggtgggagggccagctttttccacctgctacgtgaattgcatgcctagtcaaacccatcccatgagccctatgcaaatcagacatcacgtcctccagcctctgcatatatacctggttagtatgcatggcaggtggtgttctgtctcttggctttggagcccctctccctctgtctctgtatggggagccgctttttttttgcccttgtttcttgcctattaaactccctgctccttaaaacaaaactaaatatacactgaagttaaatgtataaaaatcagacagtagactttatatttcatttaggagtaggaagtggagaatacccagagaactaaaagtagtttaaagtctctatttacacttgaccttgtaggcatagtcttcaatgacatatttctagcatattctttggttctgttttcctctataaacacttgaattattgggctaaatccagtaactatccagctgaggctgaacctttctgtttttagcttatctaatgattccctctcatccatccccaagcacattcaacttaatatttgctggagtacaggctgtatgttctctcttgtatttctggcacctagactaatacttggtatgcagaaggtgctcaaataatatttgttgaatgaatgagtttattgtcttaattatataagttttgaggcctacagttcttattagcatcaatcttttgctgcttttttaatttttactcatataagattaaaatggggatagcatggtaaaataatgaagaaattttgggaacattatgatataaatatggtgctactgcagaagttgaactttagactggcaggtaggatttctgtatagttgttaaaagttaaaactgttaatttggcattgagaaggcactttagggtaatcattggttaatgggtataaatgtggcattcggaagtttttgaatgtgttagactgtgtgtgcttgtacaagaaaaagtggcagaatatgtgaataaaacaaaggaaaacagaagacctcatactttaacagactcttctgttatagggagtattcctgtttcaagcaagttacaaatattgtattcctagactaatacagttcaagaagtactttgaattcactttatctaaagtgagggatttattaatgttcacagcattcttcttatctgtacttcccaatgtgacacattgaaaatatttttttaacccttcacatttcaccttgttttctttgtcaacctatgcgtgggctgagagatttggagaatctttggtgcttcaagctcacaagtttgtgatgatctgatgcttcttttggaaccaagaagtagaataacttctggagaagtgttggatttagagtacttcttcactttaaggaaagaatatgagctatacacacaaatacacacacatatgtatatacatatatatgtatatatgtatgtataaaagtagtcactagagtggcctaataccaatagaatagataagaataagaccatttcagcattcattctgggaacccaacacttatagcacaacaacattgagtaaaaatactggtagctctttatgttactgactgtattgctaaagccagtatttgccttattctatggttctgtatctagcccctgaggctgagggaagtgaagagagaacttggagacttggccaaaaccttgtttgtgagagtgtgttgggaagattcagataccaatatcattttagtaaattatcttaggatacattcaatttcttgtatattttgaagcctagaaatatctataaataaatacagtttattttgtgaacttaaattagttcaatatctttatcaccatgtttaaatgtcagagttgtgagaagcaaatatttgaaagatagctttttttttttttaaagtaaaaggaattccttctttctttctttctttcttttttttttttggagacagagtcttgctctgtcacccaggctggagtgcggtggtgcaatggctcactgcaacctccacctgccaggttcaagcaattctcctgcttcagcctcccgagtagctaggattacaggtgtgcaccaccatgccctgctaattttttgtatttttagtagagatggggtttcaccatgctggccagtctggtcttgaactcctgaccttgtgatctgcctgccttggcctcccaaagtgctgggattacaggcatggagccactgtgcccggccctcttgcccttcttcattcttaagatgctcagatcctagttgcagctcctaaatcatagttctcttctggtctccagtatgtatgctggtggtgcttagtgttgaactttatctgtatatatttgaaaaccctcctcagatttgaacttaagtttccatgaagtgaaatgtaccccattattaatttcaaagtaaaaaattctgttaatttacttcttaagcgatatttcttcaatatttcccttcttggacttcacattgatgatagtttttaggttgtaataatttagagtttggatggtctacatttaccatctacagttgtttactccctctttttttaatgcacaagtgatgaaaatgttgtcatgtaatatctaaacaatgataaatacttagactatatataaaaatatatattctgccaaagaaaattgtcatggaaaattgtagattcaagagttaggagagaaggatatcagaatgcaattaaaacctttgcctaatggtatttccttttttattcttttaggtaagcagaattttgtacagtttctgtacagcattcaaacgttcttccagacaagtgtctgatgttaaagactcagttattcctacccccgacagtgatgtgtttaccttcagtgtctccttggaggtaaaagaagacgatggaaaaggaaactttaggtgaggcatttggaaagattaaaaattcgcattgtatctggagtataatataggcgcatataaagtttcaagaaactatacagtgttggcataaagcctcaaactgataaatatttggctggtgaattaatattttttattcttgtgcttgtcagatatttctttccttttttttttgagatggagtttcgctcttgtcacccaggctggagtgtgcatgtgcaatggcacgatctcgactcactgccatctctgcctcctgggttccagtgattctcctgcctcggcctcctaagtagctgggattacaggcgcctgccaccatgcctggctcatttttgtatttttaggagagacggggtttcaccccgttggccaggcttgtctcgaactcctgacctcaggtgatctgccttccttggcctcccaaagtgctgggattataagtgtgagccaccgcgcttggtcagatacttattttcttaatgatttaaaaaatactgatactgtagaaaatttagtaaaataataaaagtagaataaaaactacgatcttgtcagccacagtcacttttaacatttggtctcttccctttgtttatttctaggggaatttttacacaattgtatatatataccttttttttttctttatgttaagtgttctaatcaaaattgtttttaacagtaactgataatatatggtttgaccaccacttaattaaccatttcttttttttttgtacatttagaatgttttcctccagttcagatatagacagttaataggaaacagttatattatttaatgctcaactttgttccttagctgtgcctttaattctaagagtagttgctagctaggtattttatctgtagttttacagacattgaaattgaggtcatgtaaaagttgctcaagatattttttctttttagataagacaagccatattttatacattgattattttaatgaattaatttgtaagaatagtctagcctaggctagaatttgattaacttgtccctgttatgtatctctttgtccatcttttgtttatatattcatggatacatcacagtcatctcaaattctatgtgtctaaaagtatgctcttctcacttcctttgctttggatttcactgttttacaggcacttatgaccacccaaccagctaaaccagacatgtgacagtcttaagaacttcaagtaaacattattcctaaatttgttttaaaactgaaatttatcatgttgtcattttttttttttttttggagatagagtcttgctctgtcgcccaggcaagattgcagcagtgcaatcttggctcactgcaacctctgcctcctgggttcaaccaattctcctgcctcagcctccccagtagctgggactacaagcatgcaccaccactcagctaatttttgtatttttagtagagatggggttttaccatgttggccaggctggcctcaaactcttgatctcaagtgatcagcctgccttggcctcccaaagtgctgggattacaggcgtaagccaccgtgcttggccatgttgtcttttttaagatcttgcttttaactttggttagcagacaaaatataaggctcttgtaaactcaatttagaaattaataatgactgtgttgctgactataaagtttatagtcaaataaaattaatagtttgctgcctgtggcaaggtgagagtttagtatatcttaagaataagggtgttgttgcttaaatactttgttgttttgttctaaccttggaataggttattttatcattttattagattattggtaattcctattccttttgaatatttcagccctgtgcctaaggatagagataaattttatttcaaattaaagcaaggaatagagaagaaggttgtgattacagtgcagcaactttctaacaaagaattagctattgaaaggtaagcagcttgctcctaaatgctaccaaaaacttgtattgacattgttactgtctcagatgcattgctcagtgtggcttttcactatacttcattttctccaattaaaaatgaggataattaataatactttctctactttaacttagatgtaactggtttcattgaaaatcaattgctggggtaagtaaacatgaaatggttttagtttttcagtcataactgctacaactgggtttgttcacatctttttttcttgttccttatttacatacagcataaatacttttaacttttcaatcactttcgattactcttccacttagctgctggaatttcagaaactttaaaagatagatacatatttttaaaatatataaatacatacacatatacttgtgtgtcaattcacaggaaaactattcagaaaacaaaggaatggtaggacaaaagatataaataaagtcaacaagaaatgatagttctggaaaaaatattcgtaatgtagatgacaggaaaaggtaatgtctacaatatacataaatttcttaacaattggcagaaagcagaggagaaaaacaggtcagagtataaacagatcagaggaaagctactggatggctaagaaacatatgtaaagaggtcctgattcacaaaaagacagggaaatgcgaattatagtaaccttaagatatcagattgcaaaaatatgtagtgatggtgggggtatggggcaaagggaattctcatactgttaatggaaatgtaaaatgtacgtatgtcctttttgaaaaccaattaggcaacatatataaagattttaatacctataattggacacataagtcttattctagggaatctgtgctattcaaaataaaagtatcactatttaaggacatttgtaaggatgtttattaataaacttaattcaaagttaattcaatacctagtacttctttgtctttgttgctacatatttgttaaattgaaagttgctttgttatgccaaaaaggaagtgctcaaaaaaatgatgggggcatatgctaaagatagggtttgaaggggcttcaactggttacttcttgggcaatctgaacaacaaaataattaggtacttcagtcaattatcagtcagtactgaagtcaatcagtacttcagtcaaacaacaaaggatgtttattaatttaactttgaagtattatttttagtggcaaaaactggaaatacagatgcctatttggcttcaaggagcaagggaagttggtgatgctcaagagaaataaaagcctcttcatcaagactgctgtatactatgtcttattctagggaatctgtgctattggaaataaaattccaataataaatagattccctctgtcttccctccagtctctagactgggatgagggtgggaggcaattgaggcgctggctgatggcatcatggccacttctgttcctcttaaatataggagaaggtatctggcccccagttatctgctgtttttttttttagaaggtaggctatctagctccactttgttcccatctttgaatcctgccaggcaacaggaaaagttttattcagcatcttggtacagtgatgcatgcatgtgtttttaattgcttgcaaagtttggccatatgtaaaaaccatcttttataaattttaagatgcatgtgttttcatattgaacatctctgaaattgtagtttgtcttataattgatggcattttttaaatactttaagttctgggatacatgtgcagaacatgcaggtttgttacgtaggtatacctgtgccatggtggtttactgtacccatcagcccatcatctaggttttaagccacacatgcattacctatttgtcctaatgctctcccttcccttgcccccgaaccctgacaggccccggtgtatgatgttaccctccttgtgtccatgtgttctcatcgttcagctcccacttatgagtgagaacatgcagtgtttggttttttgttcctgtgttagtttgctgagaatgatggtttccagcttcatctatgtccctgcaaaggacatgaactcattcttttttatggctgcatagtattccgtggtgtatatgtgccacattttctttatccagtctgtcattgatggacatttgggttggttccaagtctttgctattgtgaatagtgctgcagtaaacatacgtgtacatgggtctttatagtagaatgatttataatccttcaggtatatacgcagtaatgggattgctgggtcaaatggtatttctggttccagatctttgaggaatcaccacactgtcttccacaatggttgaactaatttgcactcctgccagcagtgtaaaagtgttcctatttctccacattctctccagcatctgttgtttcttgactttttaatgattgccattctaactggtgtgagatggtatctcattgtagttttgatttgcatttctctgatgaccagtgatgatgagctttttttcatatgtttgttggccgcataaatgtcttcttttgagaggcatcttataattatagttgtcacctttttttcatgagatacaaaaaataatggtgagtcttaaaattgatggctttcttaaaattgatgaaaaagagctgaagatatcgtatttttgatgttgaatattacagttccaaaagaatatgattatattttgcatacaggaaccttttagtttttaggggtaagcattatatatagcagtgttttaaactttttatttggaagtaatttcaaacttacagaagagttaaaaacaatacaactagtagagagaagacctgtatactctttaccaagattgttaccaatatctcagtgttaccagtgttaccaaaatctcagatattgatgacattttacctaatttgctttgcattctctttctttttttgagacaaagtctcgctctgtcagccaggctggagtgccatggcctgatcttggctcactgcaacctccacctcctaggttccagctattctcctgcctcagccttctgtgtagctgagattacaggtgtgccctacaacgcctggctaattttgtatatttttagtagtgatggggtttcaccatgttggtcaggctggccttgaactcctgacctcaaatgatctgcctgcctcagcctcccaaagtgctgggattacaggcataagccactgtgcccagcttgcactctctttctcttctccctgctactcgctatacacacacagttgttttcctgaacacttttaagagtgagttaaatacatcgtggccctttcctccaagtgctttagtgtatgttttccaagaatagggatatcgcttacatcaccacagtatacttatcaacatacgtgaatttagcattcatacacaacttttaatctaacctgccatttgccttcctattttgccagttaacctaataatatcctttcccccactccagttcagaattcattccaggattagatattgcatttagttaccatatgtctttagctttctttaacctggaacatttccacagccttcctctgtctcttaagacttggacgtttttggagaatacatccatttttcctctttttaatataacattgcccatttttggctttgtttaatatttgtgactaaattcagattatatattgctgcatagtttatatgtccttcacagagtatcacatctggaggcagatggctatcacagagatagccatctgtcccttgatgatgatgatgttaattctgattacatagttaagatgtctgatttcttcccactatgattactttttttcttccttgcaaccagtaagcagtctgtgaggaaacacattaagaccatgaaaatatgctgggcgcggtggctcacgcctgtaatcccagcagattgggaggccgaggcgggcagatcacgaggtcaagagatcgagaccatcctgaccaacatggtgaaaccccgtctctactaaaaatataaaaattagctgggcgtggtggcgggtgccagtggtcccagctacttgggaggctgaggcaggagaatcccttgaacccgggaagtggtggtcgcagtgagccaagatcacgccattgcactccagccttgtgacagagggagactccgtctcaacaaaacaaaacaaaacaaaacaaccaaccacgaaaatatatcctgctcctcatcaaaatatcctccttaatttaacattcttgtatgattcttgttggatctagtctgtactatgatgattgcaaaatgattaatttctcaactcttgccttctctctacattttgtattcagtccttggcattctgatgtaaaccagagctttcccttttcttccatttaactacttgttattgatatagattcctaaatttaaccccacctcctccccccagtactatataattgactgaagtacctgattattttggtgttcaaattgccctagaatcaaccagttggagccccttcgaaccctatctttatgacatgcctgcatcatttttttgagcacttcctttttagcataacaaagcatctttcaatttaaaaagtctgtagcaacacagacaaagaagtactaggtattgagttaatttaactttgaataagcgttattttaaaatcttggacttttatgattaagtggtatattatgcctgaactgtgcctaaatgtaaaggaatgcaatccttccttttctcagtaagttccatgtttgatcaacttgaatatagaaacctagacaaatataggtgaaatagttgaatgcctaattatatatatgttctttgctaactgggtagaacatttgcacacacatttaaatatattacacaaaacaataacttagaaatgttactttttgcccacccttatattcatacaacaattttatcagactctcataatctttaatattgatatcttcatcatccttaaaactactttttgaataattttaaggcattttttccagagcacattatgtcaacttctgcctgagttgagagaaaatgccttttgaatcagtatatgctactaacattggatattttaccaaaaacacgagtacacatttgtacacattaggacaattgtttttaaagttactttgaatacataaatgctatattggttttatttctttgttaattgacacagaagagttgtattattgtgtacatgttttgagatatgtatacttgtggaatggctaaattacattgtttttattttaacaactattttgctgatgctaatatctaacacttgcaaccttggactcatatatccaacagtaattactgaatccatgttaaatttcattgcttccttttccactgattctgtcagataatctctgtaaacatccaaatgttaattgactaagatttcttcaggtgaatgactcttccctaaacaatactttgttcagcataacagaccaaattacctgtgatacagaagatttagtaaattcttggatttttctatattggtaaaagaaacatttgcatttcattggattaaatgtggtatttaatatgtttaaatcagactgtaaacagtggaatttaaggtagtccagcaggtggcagccttaccaagaaaattcttaacacctctgaatcttttttgttagactgggtctcactctgtcacccagcctggagtgcagtggtgtgatcatggcttactacatctttcattgcctaggctcaagcgatcctcccatctcagcctcctgaggagctgagactacaggcacatgccatcattcttagctaattaaacatcttttttttggagagatgggggtctccctatgctgcccaggctggtcttgaactcctgagttcaagtgatcttgacttggcttcctaaagtgcttggcttcccaaagtgctgggattataggcgtgagccactgtgcctgacccaaatctttaataactgctgctgacaaagttaatttgtaatataaaagcattggtgtgaaagaaaatccttcaaattacataatttttatcttctgaacgagaaaataaaatttatcattaaaaaatttttaaaatcattatttaaattatgtaaaattatcaacattctgggtttttttttgtttgtttttggtgacaggacctcgctgtgttgcccagactggagtgcagtgatgtgatcatagctcactgcagccttgaactcctggggtcaggctatcctcctgcctcagcctcccaagtagctgggactacaggtgtccaccactactctgggctaattttatgttgtcttatttatctttcatagagacggggtctcgcttagttgtctgggctggtcccaaactcctggcttcaagtgatcttcttgcctcagcctcccaaagtgctgggattacaagtgtgagccaccatgcctggccaatattctgtttttttttttgaaaaatatattatgaaagaagccatttctgtgtgcatccaagggtttaagggttgtttatatctagatattttgcaaattatactgcagttgtctgtcttgacccttttgataacaagcactatgttgtttatcccagaatccccagcatctactatagtgcttggaatacagagctttatacttagctacttactccttacttagcactttctcagtgccaggcactgttctaggtggtatttctgaggtataggtactattatcttcatttttcagttgaggaaactgaggtacaaaagttacataacttgaccaaggctataaaattactttttaactaagtacatctagtactagaacacatattcttactctctactgcttctttttaaatacttgactaaatcaataaaaagtatataaaagtttataaagttagagcattggctaaatttgttgtaatatggaattaataactgcacattgcaccaataaaatcctatgtattttaaagaatgtatgaaaactgttctcaagtcatgaaaacttttaatattcttttccttttcttgattacccatgttggatatcacatattaagctttatttaataactggatataaaagagcaataataatggccaacatttaatgaacacttactatttggtggccattgaacaacttttcttaacatatgaggaaggtactgttattattactgcatttttttttttttttgagacagagtctcactctgtcacccaggctggagtgcagtggtgtgatcttggctcactgcaacctctgcctcccgggttcaagcaattcttctgcctcagcctcctgagtagctgggactataggcatgcgccactacacccggctaatttttgtatgtttagtaaagatggggtttcaccatattggtcaggctggtcttgaactcctgacctcgtgatctgcccgcctcagcctcccaaagtgctgggattacaggtgtaagccaccacgcctggcctattactccattttatagatgatgaaacagaggtttaatcaggttaagtaactttggttacttggccagaaactggtagagccaggatttaaaccagggtcatctgatttctgactgtgtactcttaaaggctaaacccaattaattcttgattatatactaggtttaaaattaagccagtttgaagataaatgaattggtattctttggtatcttttcagcagaatttaaaagtgcgaacttagatgttagggcattcaagtgattgctcagaaatttcaaaccctcagtgccttgggagaaaagccaatttgtagaagagaaagctgacattaacaactaagaggagaaagcaagatcattgtatatgaaatgtgtgaggagtggtagggcaaagcttacttattgagggtctccagctgagatgttaaagtgtgtgtacatgaggtcaggctcttctggtgttcccaaagcagaaatggtgatcatttctctctctgactagctgccattattatgggttttggtatcaccacatacagaaatattgcaaaagatttcttgcatactaacacattgatatgtatttttaaagccttgatagtgtttaaaatacactattactagcactgttacctaaatgcactattactagcactattacttagcacctacttggatgctttgaatagtttgctatgctcaatattccaaaggtgagagaaggggaaattttttcagtctttgccattagtgctctgtctagttgatttttttttttgccaagtattacttcttatttcatgataaaatgattcaagacaaataataccatatacatttagaaaatgggcctctttattattccttaacatgaagaggttccaataatggtagtttcaggccttggggaagggtaatcaggaagcgatttttggcaccaggttttatgtctgtcctatcactcttctcaggggtctgccctcatattaatacttgtgctaaccagaatgaagtagtgatacagcaagcagaatataatgattagagttgttataagcacacaactcaatttgcagtgagtaacatgggccaacactgttggaaaataaggatttccatgagccacttctatctcacattgatttggggggatacaatcattatatatacattagaaaaacatcacttctaaatgacagtgatcatatcagatcatgtagtttgatcatttggagagttcagtgatgtgcctcttttggtagcaattttgcttcagttttcaatttgtgcttgccggcttgcagcacaaactatataatgagaaactgaagtgataagaaccatactgtgtagcatgggtgattgatagtacctttccttgtgttattttcttgaggaaaagatatcctagacaaggagtactgaaaaaatcacccagggactctcttcttctcatgaaacagttttttagtgtgagttgacatcactaaatttgatggacagtagaatttgaattgtttattattttttgactgctctaacttgatgttagaccattctgagggtcttttgctggatttacttagtacttatttttacttttgccttagcaagttgttacagttttatttaggtaaaaactcaagttactatcttgaagttgcctagatgtcagtctgatttggatgttttattctcttatgtgaattagtacgtttatgaacttttacagcaaaataaagaattttagatgttataataatttctcttagaggatatcattcctccctttcctgaaaatgggaatagattagtgggatgacccatattctgcataacattttaaaagctaccctgtgagcttactcacttgtcctttttgtgttttcttttaaggcagtagaaggataactctctttttccataggaaaacaggtattacttacttatacaaaagtactttcattattctctgttaatgatttcatgtgacaattgatagaaagctattggcattttcaggtgaataatttggggagtggataactggaagcttctatctgactctcagcctttgaactgaaacttgtaatcaggacagaattttcagcatcttttcattgctggcttctgttggcacccagtggggagaggcggcatcatggtttaagtattaaatgtggatgtagtactattacgtttttagcattgtattttaagaaatacttttaaaatatgagcaatgaaaacatatattgttgtctgtaatgtgttctcataagttgattgattctagatgttttggagctcattaaaaaaaattccagtttgaagtaattgtagatgcacaggaaattgcaataatagtatagagatgctctatgtgtgcttccccatttccccctatggtaacatcttacataaccatagtacagtatcacagctaggaaactggcattggtacaatttgcagacctctattgcagctctttttgaatccttttataaatcacagtatacttctataatataaacatttaatttattggtttaagaaatttggatatgtagcctggctgctaattagaagagattgggtattttaaccatatcctatccagttaccaggttattgccccttggctccaaatctgtcctcttagctgatctgcattaatggagctttaaacatttcttctttgcagcaagcacaatattaaattatgccagtagagggtgttgcagggacactgcaggaagatggggtttcttttgtttctgatgtgttacatttattgttttcttgctcttgcttattgtaagatccagggacatccagtgatgctgtgcttttgctgatgtttggttcaacccagctgtgcactcacatgcagtccctccgtgagctcatagctttggttctgtctcagtgaggccctcctacagccttcctgacacagacactgtgtgccccaggcctcgtaccaccctgccagtgagctgactctggaagccctgatttcctttgcccacctgcctgccagcctttgctggctgcagcccagagggtttcctgcgtgcctgtggtctagctttgcctgggcagtccaacaaacttctttgctattcattgggctgtaatcctgccttctccagtgaggtctgaataccacctttggtgaaaggacccaacttccacgttagttcttcttgtggtactctcccttagctttagggttaaattctctttgtagttactctactatgacagttaataattctttatagtaaattttccctgtttaaattactgtgttttctgtcctaatcaaatgctgacttacagtatctaattgaattaatatctaatgatattaagcagtccataaagtttctgatatttttccaggaaaaacaaaacaaaaaagtggttattttagataatctttttactgtcacagtaatggcaaggaaaaaacaactattatttctaccgtatgtttatttccattccacgcacagcctttttcttactaaagcaagaaaccctgcaaagtagattatcttttatttacttttttttttttaacggggagtagggagctaaagcattttattttgccttgctatgagatctagcttataattggcaacacaagtatttgaatcaagaccatcttgctattcttcctaaagccttttcatttgactcttctgtatgactttctttcttttttggggggccgggggatgtttacaggggtcagtattaagtacctataaataggatatgattattttatttctttagtaaatattgtttagttactaatattttatccgtatttgtaatagtagcatagttgttttattcccttttcaagatctttggatcatttgaagggaagagggaggaagacttaaaaatgttattttttttttagtaggactttaagcaattaattaaaagttaaatatgtcttataggtgaaattttgtatttgtgctttaaatatttgatttttaaaattttcagcatattttaataaatttactcattctttttatttccctggtattttttaaattttgaagttttatatatttaggtgaattatttcattattccactgtactacaagaaacttaattcttttataatatgaaatgtccctgcttttaaggctaattttctacttgtatactctattttattccattttgacatctcaaagacattgtttaagcagtctttcttctaccacacttgcttgttagattagcccatccagtctcatgactttaaatatatctatgactggatgattccaaatgtttttctctgacctgaggtctccaaacttatatattcaacaacttcagatcttcatctggcatctcaaagttaatatgttcaaaaatcaaactaaaaaatcaagtttgacactgtcccaaacttgttcctcctgtaatttctcacagtctttttaatttgtaacttgatctttccaattattgtagatgaaaaacttggcattttcaactccattttctctcactctacatctaattcttcattaaatcatattagttctacttccaactatgtaaagaaagaaaaaccctagaggaaagggattaaagaaaaaatacgaatagaaatgggaaaaaatatagactgtagataaaagaaaaaaattagaaaaaaaaacaaaagaaatgacaatcgagagaaaaagaaataggaactccaagtctaatcactagttttcttattttatcaaaagttaatgtaggtacttttgctataaattttctcataaaattgaattcatcattttttgcccatgttttgttcaaccctatctacatgtgttttatgagtgataatcaggaatcagtagcctgcaaaatgagcctttatgaaggagaaaaatggacttttgttaatcagctgtagctgtacaggggaagatattccttttctttatgcttttagatgtttttgaattgtgtttacaaatacattcaattgtaaaaatacttgtaaattagcacccgtttattttgatgcatatagctagtatctgcaaaagcccaaataatgtatcactatctgaatgtcctgtattagtcttactgaatggaaaagcaaaataattgattttaaatgttttaagcagggattaaaccatgtcagactttgaaatttattggttttcttgttataatcatttttaatatattttaaaatctgactgtagctaagttctcattttgtatttgaagggagttagtaaaagtactcatatttggtgggaggatggcttgaatcaggaagtggaggttgcagagctgagattgtgccactgcactccagcctgggtgacagagctggagcctgtcttgaaaaaaaaaaaaaaaaaagtgaagaaggaaagcactcatatttgagttattctgcattttaaattttgaccctttattaatgtgagaattaatgggaacattattgctaaggatggtatggagggtttttttgtttttatttttgaaatttattcaatgaaaaattttaagaacattgacctaaaaatattcttctttctgtatgttattttctctgtactggtatttttttttgtttttgaaatttgttggttgaaaatttaaaaaaagtggacctaagatattcttcttttatagcctatctgcatgttaaattctctgtactggtagcagctctatggcagtcctaagatctatttaggttatttttttcttggtgatttttcctagtgttctaggaaatctaagatagatagttagttacatagacagatagatagataaaacgatttcctacctgatgaatgaaaagagtaaccaatttttaaatctggagagactccttcttcctattactgatatcactgaagttactagagtgaaatttttaggataaatagctatagagtaccctcatctgggtttgaatcttggctttacagtgatcttggtcaagttatttaacttctctgtgcttcagtttgcaatttgtaaattgtgaataaaacttacctcttaagattgtggggagaagattagctagtaactgtaaagtgttcacaataatgcttaataaatgcatgctattattactattagtggtactattacaacaaccacagttaagattttaagactattggtcttttttgagtgataatcagaagtaagtaacctgcaaaatctgagtagactgctaccactggaaggcaaaatcttggctagagttctttagaacctatgtgtgtatatacaggcagtccttgctttgtagttatggtatacattattttctcttaccgtggttcagttacaacactagtctcccaaacacatggttcaaatttctgttaccatagtatattaacagagtaattgcaaaacaaactctgctgttcagtccacaagtcactatatacatacatgattagtgaccaatcatgtcgcttcttccaaagtctgttggtgattggtcactgtgtatctgttattcactttacttacagatagcaaagtatgtggttgtgttgcctctttgtctctggtaataaatccatttgacattttacaaaaatggataatccaaagaggaaattggccaacaaagctaacagtgctacaaagaaatgaaaagtcataatgctgaaagtgaaattgcatgtaattttagaagatgcacagtcttagaagattttaaaatggcaacagcaaaatgaagacagaatgagacctaggcctgtataaagttgtgatatgaaccatattgaaaaagtatgataaatttaaaaaaatgataaaatcactccaacatcctttagtttaagtttcactaggaacagaaagctgcttatggtttaactggagcatatacttctgctttggattaagactgtaataaacaaaaattccaatcagttttgctagcatgtcagccaaaatactgaagttagatgccacatcaaaaggaaatagtaattataaggagactggagattatgcaatttctttatctcaattttgggagaaatatgacataaagcatgcagttgaagacatcatttcagggagcaacaatgaatattatgtctgtagtatagcaaacttttacttcgctatagaagtaactttgaaggatatgaataggacacttatggagatgtagaataaatagctgtctgtgggagtgttgacactgttgctattcagtggactctagatatgcagccagatgaactttgtgaagatgaacttatcagtgtaaataaggaaagtggttgtgatgaaaagcatgaatgttccaggggaaatgactctggcaaatttttcacattaaaggaactcttggagatacttcacaacattgaacatgcaaaggataaagtttggaagttaatccaaacttagaaaggaatatgacagtttgccaagatagaaaaaatactttgtattgtaaattatatgagaaggcagcaagcactgttcaatatattcttgataagtttttttaaataattaaaatactttaatttttgtgcttcaaacaacgaagtgctaaataaacaatagttttactttttaacaattgtcctatatatttataactgaaagtaagagagtttttgaagtttggacaaaaatttttaaaggttactgaagaatcataatttttccttttgaaaaatatcattttatatgcagttttgcttatatggttatttttgtggttccacaccactgtacatagtgacaaatgcctgtgtatctttctctacttcagtctttttagtaagggaaataacagtctcattgacacaatagaagatttgcccaattatctttttgctttagcccctttggggagactgactgagattccaacttttatgaaattatttagttttagtgttttgcataaagttttgaaaaactgtgattgcattatagattttcttatttgcagttctgtttttccctttctattatgctgtcactttttcatttttttttttttttgagacggagtcttgctctgttgcccaggctggagtgcactggtgcaatctcggctcactgtaagctctgcctcccgggttcacgccattctcctgcctcagcctcctcggtagctgggattacaggtgcccgccactacgcccggctaattttttttgtattttttagtagagacggaggtttcaccatgttagccaggatggtctcgatctcctgaccttgtgatctgcccacctcggcctcccaaagtgttgggattacaagcgtgagccactgcgcccagccactttttcatttttaataataaaagtttagtacagcaagagagcgtgttcttttcctctctctccttccctaccttccatttttatcttcatggagatatatgtaattcctaatgatttgatagactaaaggtaaaagtttttaaaaaattagtttcatattgcaggacattaatacaacatctgtttttctcactttttcctgcagttaagtctaaagccgtattagtgatacagagtttttggtatttgttctagaggttaacttggtgttaaaagctgcttaaagttctattttgagtaaacactaagtattactatgaaagggagagctttctcttcttaatggtaatggtaattataataatttataattatcaactgttttatagtttacagtgccctttcatcatgagttttttcttttctttttcttttttttctgagacggagtcttgctctgttgcccacgctggagtgcagtggcgcagtctcggctcacacaagcttcggctcacacaagctctgcctccccggttcacgccattctctcgtctaagcctcccgagtagctgggactacatgcgcccgccaccaggcccggctaatttttttgtatttttagtagagacggggtttcatcttgttagccaggatggtctcaatctcccgacctcgtgatccgcccacctcggcctcccaaagtgctgggatttacaggcgtgagccactgcgccaccgcgcccggccaggagttttttcatgtcgagtttacgttgacgtaatgaacatgaaagcaagtatttgtacttcagaaatgtggaaagtgagactttgaggtttgtgatttgcccagggtctctcagggagcttatagtcttttactgacagtccttggcaggctgtaatgtaaaagaccatatagttttgtagtgatagacatgggcatgaatcccggtcgtgtaacttagtagctatgtggctttgggcaaaaccattgtttttgaaaatcagttttatcgtttgttgtatgaaggttgctttgaaatttaaatgtaacagtatagtagagcctggcttaaagttaagacattcaataaacaatatctattattatgataataattgatataatagcatcatcagctcattctcaggaggttgatttcaatttttcagtgaagtcagctattcactatattataaattatgttggatgtctcttctatactttgttgatattatgtacttacaggtattttagaacgaatgatatcagattctaattgcctgtttacttattttcccccccactatactgtaaactccttgagaaaataggtgggatagcaatttgctttttaccttatctatagagttaataagagactgttgaatgctttgaactccccagtgaaacactgaatactcctattaggtgttaatgttactaataatatctatctaatttctgacacattattcctaatagatcttgctggcctccataggaatcctggtgtgctttaatgaagtgtaattttgaaaatgactaatacagcttgacagaaaataattatgtaatttaagtgcttaaagttcatgtattatacctttcctgtttgctagaagagggagcagagtcccagggggttaggtgctttctctaaggtcatgctggttggtggcagggctttttttttttttccaggccaggaaaagattagtgcattaaagattatcaaaataaggtgatgagtattgctacttaagaaaaatccaaacctctaaggctccttttgcagtacaatgtaatatagaaatattatgctgagaaaatgtgaaatttcatctattttatcattcacctggaagtgcttgagaaacaaatgacattaaactttaacttttattatagccatcagagattacaaaaggtaggagggtgggagagcggggtgaaggttgaaagattacctattggttacaatgttcagtctttggttgatgggtactctaaaagcccagacagactttatctctacataatgcatacatgtaagaaatctgcacttgtaatccttatgcctataaaaataaaaattaaaaaaaatctttttctgccttaaaaaataaaaaaatcctttaaattttcaaaaagaacaaaaagaaagagagtatactttccaaactgttagcattatttcctaaggaggctgacagaagggagaaattattttttctttacatactttggtatttgttaacttattatggtgactatataatgggtttgtaatttaaaccctataatatagaacattgttcttaaaacaaaaaaccattagagatgcaagctgaagcaaagtatgtagggatgtgtgagataaatctgttctcattgacctaattttttagagagtcaaattttatttctaaaaaagaattaaatcttttattcttccttagcaagaatttagggcagtagtataagaaatagtacagtgaattgcatgattgattattatttaatttgtgtagacagtgtttattacaagaattcataggagagagatcatagcagtatataggtgaaattatgaatactagagtataattatttctcttgtagattatattttgttctctgtatttgaaaagttatcctcagagcttaccaactttagctttgctatgtacgtgatcatttttgggtgccagaaggaagccttgaacaagtgatcctcaagaacttataggaagtatacatttactccttactaagcttacatttggacaggaccagtgatcttgctcatgtcagcattagccatgatactaggagagtaaacctttgaaaaacaacaaggatgagaataacggttgagtggttagctgccactattttgaaattgaaaaaatcttatgtttaatatagttatattctttaccctttctataaattgttacatagcatatcttgaagttttgggaaactacaataaaaacattcttgtgtgtgggtatgtgttgttggcagagggaccctgtggacagattacattgcttctcaagttacgagacctataatatagcagtatgaatttgggtaaattgcttaacttctctggactttactttgcttacatgtaaagtggagttaataatagcctaacaaacataaaaatcttcgagttagctgaattttagagcttatgcaaatcctttacaaataaagtggcagtgttgatgggattcctaaagcttctctggcatcaggaagcacagaacaatattaaatagttaacagtaaattaataatatgttggatataatatcttcactaatagcccatttagtaataaagtttgcataactttttttttttaaaactgaggatatagtattaacatgctacttagtgaacatgactgtggagggccagggtaacaacagtttgctttctttttaatctggtttgatgcaaagagagcatagtgtcatcttcttatttttaaaaacctcgtttttggtttaactgggttaatggattttgacctatatgtttggaataagtctaaggcaaataaaatctcttatctccctagaaactaatttgtatctcagtaccatattttctttcaattaacaacttatggccacttttatggtagtttcttattggtaatattttacatgcaaataaagatctggaaatttagatgacttatttctgtgtgattttattatctatcttcataaatacttatttctggtgtttttagaaaaaaaactaaagcttataaatacagagctcagattgtatagttattgtaaaaaggctttatgctcactgggcttctatatattcttgataccttatttctcctttttttcccccaatattttcagatgttttggaatgttattaagcccaggtcgaaacgtgaagaacagtgacatgcatttactggatatggtaatgataatcttaagcaccttaaccaagtatagatgatagttattttatatttgacaagtattttctatttacaaattttgtcatattgtcaaaattatttcttgcagctgtgtgatagtaataattaaatttggaaacgcaaacttaaaattacttgtgaaagaggaattcaggacaatttccaccaaaacagtcatatgcaacaaataaaaggattgtgttatgataatgtccatttatttttttggcttcttagaaagatatcttttctttgaacctgtagtaacaagtacatgattataacaagcatctccagagtgaatatggtgcctttcatttattttaatgcactgctattaatttgagtttgtgatgggtacttttgttttctttaaagcgtttccctttctgaatttcttcttgattacctgtccttagcaaagtacacttatactaggagtaatatttatttaaggaatgtccttaaaggttaatatatattcaacagttgatatttagtgtaaaagtagcaagctattttaactttcaaatagaaataccttctaatattgcagttagtgaaaacatttaatttgtgatttggagacgttataggaaaataatcatcttagagtaagtataaagtttcttagtgaactgaaattcttatatttagtgataataagcactatatgctttcttctttttagctgtgttttgcaaatatcagttaaacattactaattaggtcaacttttttttgagtaatttcatggtaatatcaatactgattttatagcagtacaggaatggtttattcaggcttttgggtacctgtttgtctgctaagtgttgtgtgaagtgatgaggttatgcatatgagtaaaatatagctcttaccatctgtgggttcatggtcttgtgggaaacaaactttttagtatctggtggtacttcaagccacagaaatatagaggaagcactgcctgaataggtcaggtaaggaaaaccagttaaattgattattaaaacataaattagctattgatctatgtctcttacatcttttttttttttcttgaccacatatcagtaatgaaagtggttttacctaaggcaagccattagcattttggagccctgaaaattccatgaggaagtaaattaggaggattgaggtaatgaaaacttttaagatcctaggtcctaattaatcatggtctttcagagtttaaaagactaagatgaattactgcagagatttgtccataaaacctaaattcagattacagaattatagaactggtataaacttctgaggccccttcactatgtctctctaactttcagaacagtcctccccacctttgagtccatatctaaatcaaaagagttgtgagcattcatgctctcagacagagaaggggcttacttgcaacaaatagttgggcaaatgagaggcttgtatttgcaatgattagcagttgtgatttgttattacccagtgttgttaatcttcatagtggacattgaacctcagctagactacttctaatgaagagaaactcattaccttatgttaaagtctaagggacagttctggttattacaaagttatttttttataatcacctgaaatcatagttcttgtaacttggcctaattagtcttaattctgcactctagaacaagatattaatacttttactccttctatgacactcccaaatatcatgtgatcctcatgacaggaaagtcctatttataaatgaagatatatttttcagtgaaatagccagattacttatatataacagtcatatgctgagtaagaaaatttccgtgaatgatggacccatactttaaggtcgtcccgtaagattataatgtatttttactgtaccttttctgtgtttaggtacacaaatggtattgttatagttgctatagtatttggtacagtaacgtgctgtacaagtttgtagccttggagcaacagcctagttgtgtagcccctataccatctaggtttttataagtacggtgtattctatttgcataaagaaatcacttaatgacacataacttagaacataaccctatcattaagcaacaggtgactctgtgtgtgtgtgtgtgtgtgtgtgtgtgtgtgtagaggagagaaagagaccattatcatatgagtgtgttggggctgctgagagggtttcgtttacaagtgaccttgagtgtatttcatctctggaatgcatggtccctgcgctcaagctacacaatctgattagtgaagtattactaatacactagaaaaatatacatagtaattaccaaatgactgacacaattttatagggggttcagagaaacatctgtgaatgggtaataatgaaaaaagaaaagtttttctctttgttttagtctgacccttttaacagtctctattcataatgtgaggaaatcgctacaaaaactgaaatattgtagatactgttcatttgcatatggaaatacttgtatgctgtgtgttgttctttcatgggacaaactctacccctcctctctccacacacatatacacaagctataagtagcctagctttcgccataggagttgctggcttttttagtgagagtcaagagctggcttggtaaagtcttaaagaatggagaagaggaggaaggagagaagggaagaaagagggagtaagtgtaacagtagagggagagagttaatacacttggatgctgcttacaaaccaaaaattagtctcctaatactaatttatgattgtaagaaagtatataaatatctgacatatagaaaatagacaagtgttaattttaaaggtattaattgctacaaactaaattaatattttaagaattcattaaaaattagaatattagaagaaaaatattaactttccctactgtgattagctactagttcagtttaactgtcttcagctaattctatattattgttttaatagaaaccatatacattcttatgtgtatatgagatttggacaattggtgtcaagatcaagttaaatacaactttgtaacaatattatgtttttttgattcagcatgtaagtatatgcctccttttatccaagggtacatgtctttaaatagaaactgtgcttgaagaaagctgtagaagaatttaatatttaaataaatgcttttgtaggatgaaaagaatttacagtgaatataaagctcctgcttgactgttaatctaaattttaataatttgtattgcttaaagtaagatgtaatttaaagtagtgatttttttgatgtcttttatcagtaattactgtttgaatttttataggaatccatgggaaagagctatgatgggagagcttatgtcatcactggcatgtggaaccccaatgcaccagtatttctggcacttaacgaggaaaccccaaaaggtgacttttcttaaaagatcccttattgtttgctttacattttatattatgaacaatgttgcttgtcatgttttaaaaaaaatttggaactcaaagtggacttattctttcattgagaatttgaggttcatttttattctttatgcttctatgggggaaatctccactatttaaaaaaatcctccccaaaagatatgtgaattattattattgttattattttaagagacagggtctcactctgttgcccagggtagagtataggggcattatagctcactgtaacctcaaactgtcatgctcaagcaatcctcccacctcagcctcctgagtagctattaaatagaactacaggtgtgtgctgccatgcatggctaatttttaaattttatttttgtagcgatggggtcatgctttgttgcccaggcttgtcttgaacctttgacctcaactgatcttcttgccttccaaagcactgggattacagatgtgagccactgcacctggcctgaattaattttattagattatagagaaagcatttgggctttgtttttcatataccactatagagttatttcatttgtggagactagtgatggagaaatattaaagaaaatgatgaaaaggaaatattttagaattttgaatatttttaaattattaactatttttgcattatagtttacttatagtttttcatttattaattattggctccagtcttttggccttcgggatgcttgtaatatatattaaatatttcagttgtagcaaatagttttttcttagttttttaacttttcatattatttatcatgtctagtattgaacagaatgtataaatgttgaatagtcacatttttcgttgttccattgtgttttttcattcctacttcatccagatagctgttaattgcctgttttttgccccttcattatctacttttaaactaaatttaaagttttacctgccgagttatatgcctaccctaagtgctttactgtcattaaaccattaattcatatttagaatataatggatcagtttgttttatcattaatttttatattatttagtttatacccacagtagacttttggttactgacaggaagcattcgtgaatactgatatgaaaatataatatgttaatgaagggcattaaaatgataattattctttcatttccttaaagagagtattcaccatttatataaatcacatacattgatcacatattaagctgtctaaaaataaaggctaaacagaaaaaaagattatataaaatttaacttttcatttattagcagtaaataatttttagacccacaatttgttatttctggagacaggcttgcaaatacctgtaacttctttcttatacttgttcagaaggaagccacaaaaatgataaaaataagccagttgacagttttgaagaacaaaatataagaattttgcatatcaagttataaaaatagtttttatgtttttaatgtaacacctagtttagttttattttgcaataaaatatatatttggtccacaaaagaaaatttatttataatttattctattaaactatataatagtatattataatattctgattcaaagtatacattttaaatttaacattatctcatatgccacacaaaaatgttgccctgatttttaaaatttctaaattatgtccttgaaattacacattactcagagaatgtgtgatcaaataaagtttgatttttatggaagaagtttagaacctgagagatgaaaagtcttggatctttccactgcactaagatccagttgaatgttatattctgtcttgtgttattactccttactcctttctctaaggtcctccaggtcaagtataatgtctaacaaattttagtttctcttgaattggcaggtgtatttagtaagactgtatttagtaagaatgtaataaaattgttattgaatttgagaagtagttgatgaatctgaatgttatataatatttaaaaacactattgagggtttcttctagtggtggccttggttatttggactttcctttaacagagaactaaaaattgtaaagaaaataaattttaaaaaatatttaaaaaggaatgaggaaattacaaaatggtatggaatgaccaggccatagattcaaaaacctcaatgaggccaggtgtggtggctcacgcttgtaatcccagcactttgggaggctgatgggggtggatcaccagaggtcaggagtttgagaccagcctggccaacatggtgaaaccccgtctgtagtaaaaatattttaaaaatcagctgggtgttgtggcgggcacctgtaatcccagctacttgggaggctgaggcaggagaattgcttgagccctggaggcggaggttgcagtgagccaagatcgctccattgtactccagcctgggtgagactctgtctcaaaacaacaaacacttaggattattagttcctaagaaacatgcttggagtacttgcatacttatttaatcaaaatgtgaatagaacagttaaaaataaacatagaaggtattacaattgtaaagaactttaattctttcataagtgaggaaactttgtttaaagtagacaaggaataataaagctcgcataaaacccagaaaatttctactacagataagcaagtatacatgactgtggcagtggatatggtagtcacagaggtggtggagcctgttcgctttctcctggagacagtagtccgtgtgtaccctgcaaatgagcgattttggtatttcagcagaaagactttcacagagactttcttcatgagattgaaacaggtaggacctttttgttctcttcatatatagtaacaaacatttttctttccacacttcttttttaatgccaagataattcctgaagttgcaaaacaatacaattcctcaaagaaatcaaatgatatttgaagtcaaccaatagagtgtttgaaaaagtcacatctaggtaatattagctaaaaaaacccagcaagtttaataattacatactttttccctagaaacctgtaatgtatgaaccttcttaacagaaatattgactgcatataaaacaacgtttctgccttttataaacaattacttaaaaccaaaaaggcagtgcacagaaatatcatatgcttataaaattttaatgaaaatgtttctaagaaatacctaatttctatagttatttctgcctgtaatattagatagacaatattatatgaacatcttgtttgactcatcagtgaggttataaaattattttaatattaaatgaacaaaattatggtttctatgatatcctcaaattaggcagtattagtagataaaatatgtaacttttgtattatagcaaaggaagcagataataatgaaaaataacttgaatgctaattgtgtgagtttttaaaaaatcaggataaaaatgctctattagaataatgaacatcttttatatgctgtttttgttagtactttcattctcccaagttttaaaatgcttgctgcttcatatactataatatgtggactgctgtgtgataaaagcaggcaccagtacaggaaacaaatatagaagcctcttacccattttcatattaaaaaaactgccatggcgcatctcggctttatatactatgtacttggaaattattgtggttttaaaaaaatctttcataaaattattatggctgttatttgactcagtttttattactgtgtgaactgcttttatagcatattctaatgaaggttatgtgagcaatattcaaacttcagtctcctgagcatcttttaatattttattatgagacttttttcctgtcttccttcctccccatccttcttttttaaaaaaatagcttagttatgactatccaataattcttcattttgagccaaagaattattcatagttgcataatcgtgaataaaggagctggagctgtatagaaagttgtcattcttctaatgatgataaattataatgtaaattatacctcctagagatctgagaaaatgttaggtttttcccagttctagtacttttgactgtctgtctgcctggagagagagagagagagagagagagagagagagagagagagagacattaaagtaattgttaaaattcatgtaagtaattattgcaagacctgagactataactccttaccttaagccagaatatgctgctgtaaggccagactagcttctttctacacctccaaaaggtgggttggtttggggtggttgatggtaatctggagatgttggtctacactatacaacattggtagaaagaatgaattaggtgattacctaatgcaattcaaagtaacctttgaaaatctgggtccaggccattactactttaaagaaataaagagagaatgcattgatttcagttctaagtgatttagacacctagaactttttctttcattctgagagtgttgaacttattgaatgaaaccagaacttgtcctgtacccagacaggattagaccagactcctgggggcaacaccaaagtacatgagatgccctgttcccaaactattttttcttggcaactttcttctctcaaatatagcagaactttatgtgtgggcagtggggatgtatgaaagtctgctttgttcctgtttactgtccactcagggccaaatggcatttcatttcattcattgtccatttactgggagcaaggagagcacttaacaagaggatggaaactagagtctgggaaagtaaactagaggctgggaaagtaaactagagaaagtccttttgtgtccggaattggttcctttcagtgggttcttggtcttgctgacttcaagaatgaagccgcggacccttgcggtgagtgttacagttcttaaagatggtgtgtccagagtttgttccttcagatgtacagatgtgtctggagtttcttccttctggtgggttaatggtctcactgacttcaagagtgaagccgcagacctttgcagtgagtgttacagctcttaaaggtggcgtgtctggagttgtttgatcctcccggtgggttcgtgatcttgctggcttcaggagtgaagctgcagaccttcgcggtgagtgttacagctcataaaggtagtgcggacccaaagagtgagcaacagcaagatttactgtgaagagcaaaagaacaaagcttccacagagtggaagaggacccgagcgggttgctgctgctggcttaggtggccagcttttattcccttatttggcccagcctgcgccctgctgattggtccattttacagagcactgattggtccattttacagagcgctgattggtccattttacagagtgctgattggcctgtttttacagagtgctgtttggtgtgtttacaaaccattagctagacacagagcactgactggtgcgtttttacagagtgctgattggtgtgtttacaaacctttagctagacagagtgctgattggtgcgtttacgctcctttagctggacagaaaagttctccaagtcccacccgacccagaagcccagccggattcgcctctcaccttgacctgagtctaaggggagtagacattaattaggtgtaagtgggaaacaccaagtataaatgcccagagaactagaaagactgggaagcacagtagctgatgatgaaaggcaagtaggcccctggccatgtgaaactttggagtccacgttcagagttcttttctaaatcaactttattgaggtagttagcatacagtaatatgcacccatttaatagtacattttgatgagttttgacaaatttatacacatgaataattaccaccaaaattaagatccctcactcttaaaagttctatagtgtccatgccagctaatctttctcaccttcagcctcaggcaatgactgatgtgctgtcattacagtaactggaatcatatgcttcttttatgtaaaagctttcttcatgtaacaatgcctttgagatccatccatgttgtatgtcagttgttaatctttttattgttgaatgttattcctttgtatagctgtaccataatttattagatcatatgttggcaatttgagttgtttccatttttggttcatgtggttaattaaagctgctgtatctttctgtggacatagattttcatttcttttgggttgataccaagaaatggaattgctgtgtggtatggtaagtagaaactgccaaactgttttctacagtgcttgaccactttattttccctccagcagtatatgtgtgtcccaatttctcctcatccttgccagcacttagtatcgtcagtcttttaaattgtagctattcttaggggtgtgtagatgtatctcattgcaatgtcaatttacatttcacattgagtaatgattttgagcatttttttcttatggttattaatcattcatatatcttctttataaaatgtctaaaatttttgtccactttttgtttgtcttactgagttgcaagagttgtttatattttctgaatatattttcttttgtcagatacacatatttcaaatagtttcttcctgacagtggcttgcctttttattttcataatgtctcttgaagaactgaagttttacatttcgatgaagtcatattaatattttattttattgtttttgctttttttgtgtcctatctaaggaaattttgcctacctcaaggttgtgaagatgttctttatgttttcctgtaaagactttatagtttcaggcctattacctattttctgttaatttgtatgtatggcatgaaggcttgaggtcatcttcccacacctctctcatgtgggtatacagttgttccagcatcatttgttgaaaagactcttttatctatagaattagtttgtctaaaattaattgactgtagatgtataagtctgtttctgggacactatttctcttccattgaactctatgtgagtaccacacagtcttgctcattataactttatattatgtattaaagtctgtgttgtaagcttcccaacctttctcattcttagttttatttgttgcgagttctttgcatttccatctgaattttaggattagtttgtcagtttgtagaaaaatgcatgcccaggctggacgcagtggctcacactggtagtcccagtactttgggaggttgaggcaggaggatcacttgaggccaggagtttgagaccagcctaggcaacatagcaagactcagtttgtaaaaaaaagtaaaataaaattacccaagcgtggtggtgtgcacctgtggtcccagcttctcaggaggctgaggtgggaggattgcttgagcccaggaggttgaggcttcagtgagccgtgatcatgccacttgcactccagcctgggccacagagtgacaccccatctctaaaaaataataataaaaaaaagaaaaatgcattcccagattttgactgagaatgcctgaatatgtaaatgattttgggaagagttgctgttttttttgtttgtttgtttgtttttttgagacggagtctcaacttgttgcccaggctggagtgcagtggcaccatcccagctcactgcaacctctgcctcccaggttccagtgattctcctgcctcagcctcccgagtagctgggactacaggtacccaccaccacgcctgtctaatttttgtatttttagtagagacgaggttttggcatgttggccaagctggtcttgaattcctgacctcaagtgatccaccctcctcggcctcccaaagtgttgggattataggcgtgagccactgcacctgtcctttaggagttgctgtcttaagagtgagtcttcaataaacatggcctgtctcatggagtatcacttcatttatttagctcttctttaatttatctcagcagttatgtcacttttagtatacaggttttacacatactttaatttatctctacctagttcatgaatttttcatctcagggtataattgaaaaaacggaatagacttaaggtgtacaatgtgatgatttgatacatatatattgtgaaatgattaccgaaatcaagttagttaacacatctgtcacctcacgtaagttacctttttgtgtgtgtgtagaacacttaagatctactactgtcttagcaaatttcaagtacacaatacaatattgttaactatagtcaccatggaacatattcatcttataactgaaagtttttaccctttgatcagcatctcactttttcccccaaaccccatctcctggcaaccaccattctactctgtttctatgagtttaacttttttagactagttaaaaatgagatcatacagtatttgtctttctagtctagctttttttacttagcataatgctctccacctttacccatgttactgcaaatggcagaattttcttcttctttatggctgagtcatattccattatgtgcaagtatgtgtgtatatattcattcattcattgacagacatgtttccatgtctagtgaataatgttgcaatgaacatggagtgcagatatgtcaagatactgattttgtttccttcagatatatacccagcagtgtgatagctagatcatgtggtagctctatttttaattttttgagtactctttgtactgtttttcatactggctataccagtttacattcctaccatcagtgtgcaagggttctgttctcaccaacatttgttatttcttgtcttttttttttttttttttttttttttgtgatggggtctcattatgttgcccaggctggtctccagcttttttttcccccaagattgctatggatattcgggttctatatgaattttaggattgtgaaaaatgccattgggatttcgatagggatcacattgaatctatagatttctttggatagtatggacatttcaacaatatttttccaatccatgaacatgagataactttccatctatttgtgtcattttcagtttccttcatcaatgtcttacagttttgttttttgttgttttgtgatggagtgttgctcttgttgcccaggctggagtgcagtggtatgatcttggctcactgcaacctctgcctcccgggttcaagctattctcctgcttcagcctcctgagtagctgggattacaggtgcttgccaccacgcccggctaatttttgtacttttagtagagatggggttttgccatgttggccaggctggtctcgaactcctgacttcaggtgatctgcctgccttggcctcccaaagtgctaggattaccggcatgagccaccatgcccagccaatgtcttacagtttttagtgtatggatctttcactgccttggttaaatttatttgtaagggatttttttgtttggtatgctactgtaaatgggattttttttacatttatttttcagatagtttgtcgatttcgtatagaaatacaagcaaattttgaatgttaagtttgtaccctgtaactttactgaatttgttctaaccgtttttttttttttggtggagtcatcagaattttctatgtaataagatcatgccatctacaaacaatttaactttttcatttccaatttggatgccttatcttgcccagttgctcctgctaggactttcagtactatgttgaatagatgtggtgagagtgggcacccttgttactattcacctttgagaatgatgttagctgtgggcttgtcatatatggtctttcttattttttggggtacattccttctatacccaatttattgggcatttttatcatgaaaggatgttgaattttgtctttttctgaatctattgagaagatcatatgatttttatgttttattaatgtggtttatcacatttattgatttgtgtacggtgaatcatcttgcaccccagggatgaataccatttgatcatgtgtatgatctttttactctgctgttgatttcagcttgctagtgttttgttgagaacttttgcatctgtgttcatttggattactggcctatagttttcttgtgatgtcttcgtctggctttggtatcagggtaatgctggccccatgaaatgagtttgcaagtatttcctcctcctcaattttttttggaggaatttgtgaaggattggcattaaatgtttggtggaattcagtggtgaaaccatcaggtcctgggctttgctttgctgggagactttttattgctgattcagtcttattattctttattggtctgttcagattttctgtttcttcattattttatcttggtaggtcatatgtttccaggaatttatttattattctaggttatccattttgttgccatatagttgttcataatagtctcttatgatctgttgtatttctgtggtatcagttataatgcctcttctttcatttgtaattttatttatttgagtcctctctctttttttcttggctattctagttaaagttttgtttatctttccaaaaaaccaggttttagttttgtccatcttttctgttgttttactcttctctatttcatttatttctgctccagtctttactattttttccatatgctaatttgggtccagttttttttcccctagtttgctgagatgtaaagttaagttgtttgaggtcttttttttccccataatttagacatttatcaatataaactttcccacttagaacttcttttgctttatcccataagttttggtatgttgtatttccattttgttttgtcttagatgtattttaaatttccttttgacccattgattgctcaggaatgtgttctttagtttctatatatctgaattttccatttttccctctgtttttatttctagttttataccattgtggtcagaaaagatacatgatatgattttaattttcttgaatttaagactttttttgtgtgtcttaacatatttattctaaagaatgttctgtgtgtgtgtgacaagaatgtgtattttgctgctgttggataggatgttctttatatgtctattaggtccattttttctatagtgttgttcaaatctgttgattccttatgattttctgcctgcatgatctatctactgtcaagagtggcataataaagtcccctttattattatattgtcatttatttctccttgcagttctcttaatacttgttttataatgaggtaccctgatgttagatgtattactatttacaatagttaaatcttcttgatgaattgacccctctgtcattatataatgatcttctttgtctcttctgacagtttttgacttaaagtctactttgtctgatataaatatagccactctgttctcttttggttaacatttgcatggaatatctttttccatcccttcattttcagcctgtgtgttctcaaagctaaagtgagtctcttgtaggtagcatattcttggatcttaattttatatccattcagtcactctatatctttgtttttgttttgagaaggagtcttactttgttgcccagattggagtacactggtgacttgatcttggctcattgcaaccaccatctcctgggttcaagtgattctccaacctcagccccccgagtagctgggattacaggtgtgcaccaccacacttagctgatttttgcttttttattacagacagggtttcactgtgttggccagactggtcttgaactcctgacctcaagtaatctgcccgcctcagcctcccaaagtgctgagattacaggtgtgagccatagcacccagcctactctatatcttttgattgaataatccttttacatttaattattggtaggtaaggacttattattgtcattttattaatttttaaaatggtttgtagtcctttgttcctttctttctcttttgctgtctttctttataatttggtgactttttgtgatggcaggcttttatttctttctattaatcttttgtgtatctactgcaggattttgctttgtaattaccatgaggcttacataaaatataattattacatgttattttaagccagtaacaactcaactgtgtttgcatacaaaaattctacacttttactcccccatctctcatattttaggttattgatgttacagcttttaatattgtgtgcccattaaaattattttagctataattatttttaatatgtttgtttttaacttttatactagagttgaaagtgatatacataccaccacaagaatattagagaattctgattttgactatctatttgcttttaccagtgagttttatacatttatatgtttttacattgttaattagtatcctttcatttcaacttgaagaactttggcatttcttataaggcagatctttgtgatgatgaactcctttagtttttgtttgttggggaaagtctttctctctttcatttctgctgtacagctttgccaggtatagtattcttggttgaggatttcttttctctttcaatatattgaatatattattccactgtttcctctcctgcaaggtatctgctgaggaatccacttacagtcttacaagggctcttttgtatgtgacaaggtgcttttctcctgccattttcataattctctctttgtctttgacttttgacaatttaattatactatgtcctggtgtagacttttcagcctgtttggaaatctatgggtctcataactttgactgtcctcttcttttcctaaatttgggatcttttcagccattatttctttatatagatttttcagtctctttatctgtctcttttccttcggatacttctggaatgcttatgttgttttgctcgatggtgttccaggtatcctgtagactttcttcactctttgtttgtttgtttttgcttctctaactggataattttaagtgactcatctttgagttcactgattttttattcttctgcttggccaagtctgctgttgaagcatgctattaaatttttaaattcagtcattgtattcttcagctttatgattttttgtaaagagggtgcagggtctcactgtgtcacccagcctggaatgcagtggcacaatcatagttcactgtaacttcgaactccagggctcaagtgatgatcccaccttagcctcccaaatagctagaaaaacaggcatgggccaccacacccacctaattttttaaaaataacttttgtagagacagggtcttgctgttttgcttaggcttgtcttgaattcctggtctcaagagatcttctcgcctggcctcccaaagtggtaggattataggcataagccactgtgcctagctggattttaaaaatggtttttattactttgttgaacttattttgttaatgtattgtttttctgattagttgtctgtgttttcttgtagttcactgatttttaagagtattattctaaattctttgttagttacatatcttcatttgtttagggtcagttattacagctttattagtttccattagtggtatcatgtttccctgattctttgtgatcctcatatcattgtattagtgtctgcacaatttaggaagtgatcacctcttctagcctttacatgttcactttggcaaggaaagatctttactagtctgccaagcctgggcttctggttgggccagctggtagcatatgcaggtaagtgaggctggggtctctgatctggtggggctgctgccgttgctctaaggttgggtggagctctcttgttgggcaggccccctgactggtatctgaggtcaagtgggactgttggttgggctttgtaattgcctctggttgggtgaggctgcaggctgtgccccaaagttaggcggggttgctggctgggctctacagctggatggcattacagtcaggtagggatactgattggactccctgattggttggggctggaagctgtgccccactgtttgatgtagtcattggctaggctccctggttgggtgggattgcaggttatactctgggctgctggcttggttccctgcctgggcatggttgccatctgtgctttgcagctgggctggattgctgactgggaaacctagacacccagtactgccaaccatactccctggccagactgggtgccaggattgctttgcaggtgggaggagctgctgcctgggctccttgtcaggtgaagctgtcagcagggatgtgtggtgccattgccaagatacatgtgcttgttgcatgtggtctagtcctgacaattctcaatattctgtaggagaagagatataatttggccttttgggaagcatgctggaatattgggaaagctagatgttcaccttgtgctgctggtgaaaccatagactcagcaaatctctcttggcatgaggctgttttggcctggggtagtggcaacatcatcaaattgaaattgctccacttatacttccaatacaacttttctaagttttgtgcttctggaatttttgcaaagatgttcttgtatgtagatagttgctagttggtatttctgtgatggggactagagcttgggacctcctattctgccatcttgctgatgtcattcctcagaacacacatgtttttgatattactataaattgtattctttaaattttaattttttattgtttatttttagaatacataaagacttgatttttgtatattagccatatttcccgcaactttgctaaattaacttgttttctttttcttggttttttttttttttgagactgagtttcgctcctgttgcccaggctgaagtgcaatggcgagatctcggctcactgcagcctctgcctcctggtttcaagtgattctcctgcatcagcctcccgagtagctgggactacaagcatgtgccaccacacctggctaagttttaattttttgtagagatggctcttgctatgttgcccaggctggtcttgaactcttggactcaagcaagcctcccactgcagccttttaaaatgctgggattacaggcatgagccactgtgcccagctcttttagattcttaatgctttctctatatattatcatgttgtctgccaataaaggtagttttctatctgaatgcctataaattctttttcttctcttgcttagtttttttcttccccctgtgaacagtgttgaaactctatcaaatatttttctgcatctttgtggtttttccccctttttttcttatcaatatattgaattacattgattttttttaaacattaagccaaccttgcattccttaggaaaagtcacccttggtgatgatggtattctttttatatatcactttattgacccagtaatacattttaaaaataatttttatgtctatttttatgagacattggtttatagttttcttataatgtctttgttggattttagtgttcatgtagtatggtacctcaaaaaatgagttggaaattgtttcttcctatatttgctgggagaatttttataagatttgtattatttcttccttaattgttggatagagttcaccagtgaaaccatctgggcctatagtttactttatgggaagccttttaaatcacgaatttaatttctttagtaaatattggatttattccacttattattttttaaatttcttgaaatgttggtgatttgtctttcaaggaatgtttcaattttatttggtctattgcacaaaatattgacctattttttttaaacatctatagggtttgtaggatcttcctttattcctgacattggttaatttatttgttttctccctttgttttaatcagtctaggtagaagtctgtaacttattgacattttccctccaaagagccagatttcgggtggtttgattttcttatttttttttctgttttctcttcagtttattccctttgttgtttcattatttttcctgctttgggtttcacttgtgtttctttttctggcttcatgtgaagattagatcatttattattattattattattattattattattattattgacagggtcttgctctgtcacccaggctggagtgcagtggcacgaccatagttcactgtagtgttgaactcctgggctcaagcgagtctcccatctctgcctcctgagtagctaggactacaggtacatccatcatgcttggctttttatttttgtatggatggggtgttgctatgttgctcaggctggtctcaaattgctcaagcagttctcctgccttggcctcccaaagtgctaggattacaggtgtgggccattgcacctacctaatcttttttttttttttttttttttttttttactgcttttttcctaatacttttgtatttctaaggtttaaaccttccctctaaccactgctttagctgcattccatgaaccttaatatattgtgtgttcattttaattatatttgaaatattttctaatttcccttgttatttcttttgtgtcctatgggtcattcagaagcatattgtttgattttccaatatttttagattttccttttttttgctattgacttctgatttagtttcattttggtcacagagtatactctatatgatttgaattcttttaaactgttcagacttattttatgactcagcatatggtctactgtgaatttttcaagagtacttgtaagggatgtgtgctctgcagttgttgagtggagtatcctataaatgtccattatgtcaagttctataataagattttcctgtgatctttactcagtagatcaacaatttctatgactattactgtaagcaacagtagtaatagccactactaattattttttaattagtttactacataccataccctcttctaagcactttacatggattaatttgtgtaatcttcagtaatctctattgaggtgtaagtgccattattacctccattctctggatttgtacttaggcacaggtaggttattaggtggtggaccaggaattgaatctaagcagtttgaccctaaaacttacacataaaatgtttatggaaagtggaaaattatgataatctaacactaaaattaggatttttttttttcctgaaaactttttttcatgaacagtagttttttttggttatattcttcttcaatttggtttttccttacttgcaccatcttgatgctggtatcactatttaaattagttatatgaagagtttgtaaagaaaatctaaggacttgtaacattggaaacattgacagtgtacttgcccttactcctttaacaaaataggctcttggctggtaaaattcagtgatttatgatcctgatccatgaagagcactctgctcatatggggttatttgaaaactgtttgccaaaaagatttctgctctaaaagcctttctaaatgaatgaacatttggtattttcttgttacatgctaactccactggcttaaagctttactggttgttaaaatgtcaacatctccaggaaataggtcataataacttttactagttgtattgtccttattggtagtgactttaataagattctttcctttagtctaggttttattaggggtcaaggtaaagaaatgaagagggcatttctacttgaagtgtcactatattgagcaggaaaggccaaagtcctgtatcacttacaatttcactgagatgccggtattcattttagaaatgattttcaatgtttagtttagtttattaaacacttattgagtgcctacagtgtggtaggcattatgcattatgtgataggcattatgctatgttggggatatttgaatgagtattatctattctctgttctaaaacagtaaacaatatactggtaaaaatgttacaatactagatgataatggaacaatagaagtatatacatagttcagaagcagcactcactcatcacccttatcacccttattggagttcagttagacatcctaggtttgtatccagtttactctggtgtatgtttcacagctgtataaccttaggcaagatattagtagtctctgaaatggggattataattatgccaccccaaaagattgtcatagtgaataaatactaattcatttaagacccttagaacaatgcttgctacctgataaacaacaaatatgagttattattgttgttagtattattaattgactacctgtttgtcttctatctagtctgtattccttttgggcagagtcctttgtgtagtcagcctaacataaatgaattaatgaatcaatgaattgaagaactaattctggtggataggtcaggtgtttgaagtgtgacaaagcaaagaaggggatttcagtcagagacaatagttggttaacttcataaatctctgatccaacattgtatattcaggatttgtgggaaatcagatattgatggagcatcagtggacttgggtgggcaattactctgaacagatagataggtcattaccatgtcaggaatttagagactatcctcaggtacggaggaaccactgaagggttttaacttctgaatgactctagatttttaattgagaaaggtcactgttactacagtgaaaaggatatcgagactggtaaataaaaagtaagaaggctattgtggccaagataagaaatgatgatagcctcaagaaaggcagtggcagtgaggatggtggaaaagacaaatttgagagatgttagggaagtaaagataaacaagatttggtgtctgatttcatgtgaggttgagggaaaggaagaaaggtgtgattattttcaggtgactgggtggttgttgatgctcttgattgagatagagttcctgaaagaaaagttttgaggtgatgaaaggtagtgaagtttttgatacattgaatttttttttttttcttgagacagagtctccctctgtagcccaggctgcagtgcagtagtgtgctcttggctcactgcaacctctgtttcccaggttcaggtgattctcctgcctcagcctcctgggtagctgggactacaggtgcgtgccaccatgcccggctaatttttgtatttttagtagagatggggtttcaccgtgttagccaagatgggctcgatgtcctgacctcatgatccgcccaccttggcctcccaaaatgctgggattgcaggcatgagccactgcgcccggacttttttttttttttttggagacaaagtctcactgttgtacatgctggagtggtgtggcgcagtcatagctaactgcagccttgaactcctggtctcaagcagtccttctgcctagcttcccaagttgctgggactacaggtgtgtgccaccacacctggctagtttttctttctttcttttttttgaaatggagtctcactctgtcacccaggtcagagtgcagtggcgccatctcagctcaccgcaacctcctcctcatgggttcaagcgattctcttgcctcagcctcccagcagctgggactacaggtggccaccaccaggcctggctaattttttttgtatttttagtagagacggggtttcactatgttggccaggctggtctcaaactcctgacattgtgatgcacctgcctcggcctcccaaagtgctgggattacaggcatgagccaccgcagccagcctttttttttttttttggtagcagtggggtctcactatgttgtccagtctagtctcaaacacctgagctcaagtgatcctcccaccttggcctctcaaagtcctgggactataggtgtgagctaccacaagtggcctgataatgttgaatttattgttcctgtgtgactcccaggtagagatgtttagcaagcagttggatatttgtaacctaagcttgggaaataaagatttaaaaagtggtcagtgttgagaatgatgaaaagcagtagatgaaatcacccagagcctaagtattgaatgaggagtgaaggctaagccttgggaaacacagacgtttaaaaaattggagaggaggaggattgagccaaataaatatagaaggataacacagatctgggggtaaaatcataagaacatgatgtcaggaaaggcaagagaggaaatagtttccagcaggagagaatgcctaaagtatcagttactgcaaggagcttatttagggatttaattggtaaataagagacagtgttcttaaactcttaagacttggacaatttctgaggaatagtgggacagaagtcagattgcagttgatttagcgttagttgatttaactcccagccctctgtgcatctggagacaaaagagatgctgggtacaaatccaaagtattaggatagattttactttattttatgtaatttactctcttcttgtacttttcctgagtttggaagccaaactcttctgctagtgatactactgaatgaacattccattaaaatatggactcaagtgtaaaaactgcttgtcgccaacatttataggaattgcgtaacagatattttagaagttaatttcttcggcagatttggtgtaattcagaaattatgcatcacttggtattttctttttttgtaatttattgaaggtatttgaagacagctgaaagaaaaatgagaatttcggaaagttcccttgctttcagttttatgtgcttaacatgtcaattcaaagtttttttaatgagtttttaaggaccccaatatagaattcatattggaaatactcataactttatgttgataccagctgttgctactctgataaattgcttaagaaatgatttaatgggctattatttcttctcctgttactggaaataaatgtcatgcatctttatccataaggtgtttagtgacaggattctttgatagggaactgattataatacaaataaaaaacaagtacctttttaagtatttgttttgttttggtttgctttgttttaccttgcataattttttgaattatggaataattctgtattctgctggtgatgtttaggcaaaacaatgataagacaccaggcacatttaggtgctactacttatttctgagtatgtactatattgtattgaagtgagttgtaagggagaaaacatttcttagtgtcttaggtttatggctaagactccctataacaaaagacagaataacaagagaaaaacatagaaatttatttaagttttacatgacatagtgttgcaggttttctttagttcagctaaagacggggtccttgtctgtcccacgccacagaaatttcggcttgcagatggtttgaagggtgagtaaagcaggattttattgggtgaaaaggaagaaaagggggaagcagggactctcgctaggccagagtgctagagcgcctcccgccggctcttcaaattccaggttccacacaggaagaggaagggccaggttcctcctgctgcaaacagggcgaacttctcgagttccactccaatgagcattacggttggagtttttctggggcggcccttgcacctggctgtctcattcccctctctaaagaagtatatctaactgctgttagattaaggataaggactaagaccgatcttaactgcttcctgctgatagggggtgctgttttgggggaaatggcagagctccctcagagacctatctaagggtttccagcagaaggggccatcgtcagaggctctggttgcatgattgtttggagtttgatggcctgaaggcaagaatagacaaaccgggttattagaagacatatataaaaatgaaacaagggcacaggtaagggcagctcaaaaatcccaaggccggagggcaaaagcctgactggcaaaaacactttacccttttgctggcatgttgggtttttgggttccctttccctgaggccaatcctaagccaaccagtgtaagggctgggaaattaactctttccagtttggaggatgcatccgagggacgtgtcccatagtacagagacacagtcacctatcagtgaagagaggacagaggagaaaaaaggaaaaaagagggtgccttttaaaggactcctaggggtccagggtgtattttaaaggggaacagactgaagataaatggctacccatctagaaagaggggagcaggcgtccctggttcccttctcttcctagcagatacccagggtacctgagggagagagggaagagcgtcctctttccgtcttctgtccttgcatccccgagttctggtgaccttggcaggtgccaccatgagtaccaaagctgcttgcactcatgaagcagggggacctgagaattggaattatctgctctcacctatgtctctttctcacctactgtcagtagccttggagttccctagacctgatttatgccatggatactgatgtggcctttatccaaataggaagcttgggcttggcttaataggaaggaatcagccacactcacctgcgctgtgccttttaacttcccttattgtctgcctttggatccttcagatccaattttctttcctatggctttgacccaaaatttggaattgagtctggggcagaaatgtgtcttaagggggttgaatggactccttatcataagccaaatgctaaggtgaaactgtggaactgagtcctcctccaacaagggagaggaaaggatgtcttgtgacacacccagataactggtgctaagatctgggtacatggtgcctggctttgtttacctcccttggtcttactttcccaaaaggaaacctctgagtgatgatcatcctatttattcccatcatctggcaggatttgcaggataattgctcagaactagaatattgatccagacttgtacattacccatcccttttgttctttctgagctgcagccagaaattgctggttagttcacaggaacaagcagggttagtctaaaatgtaggtgaaaacttaaaaacaacgaatcagtttagaatttaatggcaaatataagttttgaaacgtgatttctctctgtctagtcctcatgttaaaaaacaaatcgtcataggactgagtggtttgcaaaatagactttagttttatacttggcctgattatttgcataaagtgcagcaagaataattatttctacataggccttttggattggttttgatggaagtttgttccataaggaatctcagataagaccttttaagtctgagcctaatcatgggtttgtatcctcaaacacttgtgagttgggtgattctctcctcttagggtcccaagataaacttggagctcctggacctgttagcaagtgacattctttactgaccacaggtcaggaactctgtacagggactgtgtagacaagggtaggtggccagtttctcactgggcttttatgggctctgcaatttgagattgactcagcctcagtaaaataaccactttctccaattgtgctctgttgcaaaagaaaaatgaattcttactgcactgatgcaaacagctatattgccataagaaggctcacagatagttttcaaattctggcggaaccaggcagagagaaacaaacatgctccaaatcttgatcataggaatataccttactcaattattaaaggccataaatagttcaaaataagtttccttgactctgaaaaacaaagcaaggatcagcagtattccaagtaaaagtcaaaaaggttgctttggctttctgagttcagtgcatttagttaactcttgttttgcttgatattcatgaatatttcagctcttcatgagtcctgtacattttcctttattaaaatgttacagtctccaaagttatcagaagtctgtgtttgagagcgactgttaaagttctatagcttattataaaccatcttttgaaaaggattaaaataagacaacaattgtctgtgagtagcaaaatacccagggtggttacagttagaaacacaattgacaaataagtgtggttatttctgtggtttatgataacttaacattgattatggttgacagcatatacttagacattagaattttagaaatcccgtatgatttttgaacatatattatcattattcacaaaaatataacctaaagaagacagaacatcattttggcaatcccatatacctaaacatgtcaaataatcctgtttacctctctttttctggacacttcagggtcccctgaagtatttgaaaagccaggtgctggctgggagtggtggctcatgcctgtaatcccagcactttgggaggccgaggctggtgaatctcctgaggtcgggagtttgagaccagcctggccaacgtggagaaactccatctctactaaaaatacaaaattagcaggttgtggtggcgcatgcctgtaatcccagctacttgggaggctgaggcaggagaatcccttgaactcggtggtggggtggaggttgcagtgagccgagaatgtgccattgcactccaccctgggtaacaagagtgaaactccatctcaaaaaaaaaaaaaaaaaaagtgaggtgccagggaacacggttttgaaactgaagtttgattttgggaaggctgttaaatgttcaaggtttaaaatacttgaagccaggcctggtggcttatgcctgtattcctagcactttgggaggccaaggtgggtgaaaccccatctctactaaaaatacaaaaattagctaggcatggtggtgggtgcctgtaatcatagctacttgggaggctgaggcagagaattgcttcaacctgggaggaagaggtttcagtgagccaaggtggcgccactgcactccagcctgggtgacagagtgagactctatctcaaatgaatgaatgaatgaatgaatcaatgtctgagaactgaatgacaagaaggaactcaccatagtgacacaggatttttcttggtcactttgccagtcggagacctctggttggtaacacccctgtccgggttttgctgggcctgggttcatcacaggagatgccccacacttggcctgccagttcatgcccggtctgcagtttgtcatggatcccacggccactgtgactgtgtattcaacctctggttggaggtggggtgtgagcaagcaagtgtggggtctggccagttgttccaagtgctgacacagaagcaggctttgtgcagtgcttgttgctggactaggcatgtctcaagcccactcctgtgatggtctctgatgtccagatagaggacacagcacccaggcaggggtgctgtgactccgaagcccctgagggggtgttacagcatgctaattagctcaaggggctgaaagagctgttaacacaccgccatctggaatggatggcggtgtgttaaccactctttcagccccttgccccagtttggcctgtggctgcaggcctggctcagccccattgctgctttctgttgtgtggggcagctgccctctgccagcagagggcagagggccacaatgttacagccttctgtgtacccagtttcagtgggtcctgagttcttgtcccatgaccaagaagaataggatcacgctgagaattgaagagtgaggaaggtggagaatttaattgagcaatgaaacagatctcagcagagaggggacacaagggtggtcccctacccaaagtcaggtggcctctctcccattgtggctgggtccagggcttttatgggctcagattggggagtgtatgctgattggtttgtgagtatgcaaaaagattaaaacaaaggcaacactcaaagttgggcatgacagtgtaaaatgttaattagggaaggggaggtatatgtaaaataggcgaaggctggggatcaatcagaggaaagtgtgccaaatgggaagacagattctcagtccggttggtggatttgacttgtaacttgtctttcaggctttaaactgccttttggcttgaaggtggggtttcactggggacctgcccctgtctgcctaggatttgtctgcctcctgccactgtcaatataaagatccagggaaagacttttcaaaggatcagctaatgtaaaagttctaagatacggacaagcttggattgttgttaggattgaattcttgctatccttattgttattaccatagtaattattttttcaggatttccagagtagtggtagattaggacacagaagccacttttgctgcttcattattcctgaacattacttgcatattgtactataggttagactctctcatgcctcatagtgttacatcaacagcacaaaatgataacaagaaataacacttgttattactgtgtactgagcatttttctaaatactttacttgctttttgtgtctggcttgggacagaatttggattcagaaaagagagaggtctcaagaaacaagagaggaaggaaagttagaatgaattgagaggagccataatggtaaaaagacatgaaatggtacttcaggtgaagagttaaggaggagcagaaacttttctcttgataaatctgttttccacatgccaacttcctgttttttattttcaggcaagagatagtttggagagaagaggcttgcccataagaaaaggataggcttcaggtcaggacaggagttagctgttctcagaagtttctatgacttgactttcgatacagggaagtaagctacttttttgatctgtgctaagtgtaggtttgatattaaaatatcaaatgttttcttgccctctcctccaaatatcttctttgcttttgagtgccttgacattcctttaagttggagacaaaacttttaatcaactattaaagttaaaaagcataaaaggaaaattcctatttgaagatgcatgttggtttaaacctacttaaatcaaagtatgatcagtcagtaaataaccaaaagtaaccaaataataagaataactattctaactgcagaaagatgaaaattaacaaggttgtggagtacttataaagttgtgagaaaatatctgttgggggcattttctttttttttttaacttagtgcttctgattagcattggcgttctttagtgtcacctctgcagaggtaaatagaagctgcttggacatgtattttttttcatgtgatttaatgtatctgtagcttagtgagaatatttgattctgttacatgttttatatagacattcttgttgaaaataacaggtcttgtaggcaatggttctcaattcagctttgcatcagattaacttgtgaaccttaaaaaaaaaaatccagattcctaaatcctgccctaaggattaggcattagtgtttaaaatataaaaagcctcaggtctggtttcctcatttatagccactgttgagacttgtaactttagagaatttatagagatatcagcatattgtactttgtatttaatatttgatgatggcatgccatattgaaaaaggttttagaatttatttgcataaatgtgatgaatctttgtaatgtgacttagccaacgcacatttattgagctcctgtttacatgttgctaagctgtaatgaatgctaatatgaaccaggcaattttctttacaaatacagattgattttttagttatctaaaatatgtgaatattgggaacaagtagtgtattttaataaaaatacacttatttgaaactcagtttttaggtgcaatatttagattctatatgagatcaaagtagttcagattctgcttgtataggaaactaagtgcagatgaaatattttaccactattgtacaattttgtactacaacatcagagttgagttgtttatacaaaacatttgtcaacttctgagaaagacagttatattgtttgtaaataagaacagttttatttccaatctgtatactttttcttgccgtaatgcactggacagggcttccatgggatgttgaatgagagtggtgacagtggactttcttccttctttctccatctcagggggaaattattcagccttttacctttaaacatagtgttacttgtagatttttcttagatactctttatcaggttgaggaaacgtgcttgtattacttgtttactgagcatttttaacatgaatgaatgctgaattttctcaaatgccctttattttgattatgacattaattgatatgaacataaggtctttcttctttagtctattaatatagtggattatgctgattgatttttccaatgttgaaccagcttggcattccccaactaaatcctattggttgtgatgtattttgtatgtgtatatgtataaaatttgtaatttggtttatatatatttgatttgaaatatatttgaatatatatttatttgaaattgttttatgtatatgtataaaatgattcgatttgctaatatatataatttataatttgattagcaaattaaatccatatatatttatatatgtaacccacatatatatttttatacatatagcaaatatatctttaacaaaaaatataacaactatatctgtggctacctatcagggatgggtataatataggaaggcatattggtatgcatgtggttccccaactgtatacagttgtaaaaattctttgagctatatactttaggttcgtgtaaggtagtcagttaagagtctagcatcacttgcttatctgtctgtcctagaacctctggtgtctcaggtttttctgatgaaaagaaattgagttctccaaaaataattagtaggtttcatcatattagttaaaaataatactagaggaacataaatttagaatatcctgtgaaggacagtgcaccttaaaagttttcagaacctcagacatgctgtagatcaaacacaacacgccattcttcattgcagctcttttgaatgcattatttaaatactatctttcaatgtttccttcagatttctaatacttaaatatactgttatatttttctcagtctgagggaaaaggccataccaatgctggagatgcaatatatgaggtggtgagtctacagcgagagtctgacaaggaggaaccagtcactcctactagtggagggggtccaatgtcaccccaggatgatgaagcagaagagggtaagaagttggacttactcagtttattctgtctgtatagctgctttacttacaatcttcagaggaggtgtgtgtgttgtgggtagaagtggtggttattcctaacctctgttaccattaggccaaattctacaaggtgcagaaaagaatttggttcatttggttcctaagttgcatagtctccagtgccacttttgcaactatttaaatttgacagcatcacttggctgctgttgttttctattttatttcaattatttttattttttattttcttgagatagagtctcccctgtcacccaggttggagtgcagtggaaaatctcggctccctgcaacctctgcctcccgggttcaaacaattctcctgcctcagcctcctgagtagccagatacaggtgtgcgccaccatgcttggctacttttttttgtatttttagtagagatggggtttcgccatgttggccaggcttgtctcaaactcctgacctcaagtaatctgcccgcctcagcctaccaaagtgctgggattacaggcgtgagccactgcacctgccctcaattaattttttaaattttttagttgtaattatagccttttttttctattttattttttctattttattctttgcatatatatatatatttttaatactttaagttctagggtacatgtgcacaacgtgcaggtttgttacatatgtatacatgtgccatgttggtgtgctgcacccattaactcgtcatttatattaggtatctctcctaatgctatccctcccccctcctcccaccctataacaggccgcagtgtgtgatgttcccttcctgtgtccaagtgttctcattgttcacttctcacctatgagtgagaacatgcggtgtttggttttttgcccttgcaatagtttgctgagaatgatggtttccagcttcatccatgtccctacaaaggacatgaactcatcattttttatggctgcatagtattccgtggtgtatatgtgccacattttcgtaatccagtctatcattgttggacatttgggttggttccaagtctttgctattgtgagtagtgctgcaataaacgtacgtgtgcacgtgtctttatagcagcatgatttataatcctttgggtatatacccagtaattggatggctgggtcaaatggtatttctagttctagatccttgaggaatcaccacactgtcttccacaatggttgaactagtttacagtgccaccaacagtgtaaaagtgttcctatttctccacatcctctccagcacctgttgtttcctgactttttaacgatcgccattctaactggtgtgagatggtatctcattgtggttttgatttgcatttctctgatggccagtgatgatgagcattttttcatgtgtctgttggctgcagaaatatcttcttgaagtatcttatgagaagtttcaaatgatctcctgtgactttagaattttcatgattgttacgtcatgtcctgtttctcatttgacatcattcaattcttgtttttttttgttgctgtaccccttaccactgcttttttttggaaatagtggggtatctgctctatttactacatggttgctgctgagcaataactgacctcacaaaaagcacatatcatatggctctgtgctcaatactctttttatacaaactagagctaaatgacagatgtttacttttaagaccttgtatcatgtgcttctagggtatggtttattaatagtaaatttcttaatttttattatctttgaaaaaagcatcttagaattctcagtcttgcttctgtatgaaactgtttttttctatgattgccataaacataataattatttttagctaatatttatttagtgcttactatatgctaagaacattccaagtatttcaaatatgttaacttatttgagtcttacaatcccatgaatactcttattaacttggttttaaggatgagaaactgagacacagagagcatcatcacttgctaagctcactcagcttaaagtgacaaagctgagatctgagtccaggctatctgactttaagatttgtacttgtaactatgacattattcggtcaagttagtcagttgactaaaacatgagaacagctcacttttaaaactaaggtaaaattcacataacatgaaaataacatgaaaacttaaacatgtacaactcagtggcattttagtacattcacaattttgggcaaccatcacctctatctagttcttaaacattttcgtcatccaagaggaaatattatacctattaagcagtcactctctgttctcccctttcccttccccctggcagccactaatctgctttctatctctatggctttacctattttgcataattcatataaatggaatcatacaaaatgtgactttttgtgtctggcttctttcacttagcacagtgttttctgagcatattgtttcatctacattgatacatgatatagcaggtgtcagtatttcattccattttatgactgaataataattgtttagataaagcacattttgtttatccattcatctttcagtggacactggttggttccatattttggctattgtgaataatgctgcagtacacatgggagtgcagctgtccctttgacatactggttcatttcctttggatatatatgcagtagtaggattgctagattatatggtagttctatttttaattttttgaggaaccaccatagtgtttttcatagtggttgtaccaatttgtatatctaccaatagtgttcaagggttcccttttctccacatccttggaaacacttacttttgctttttggtaatagccgttttaatgggtgtgagatgatatctcattgtagttgtgatttccatttcccttatgattagtgatgttgagtacctttgcatatacctgttagtcatttgcatgtcttcttttgagaaatgtctatttaggtcccctgtccatttaaatttttttttctttttgctattgagttgtgcaaaattcacatatatatgtgtatttacatatgtatgtgtatatgtatacaggctgtatacatatctgtatatatacacacacatatacatatatgcatatatgttatgagatgtgtgatttgcgaaatactttctctcattctgtaggttgccctttcatactgttgattgtttcctttgttttgcagatgttttttagtttgatgtaatcccatttatctatttttgcttttgttccttttgcttttggggttttatccaaaaaatcattgcccaaaccagtgtcatggagctgctcccctttgttttcttctagtagtttaatttaagtctttaatccatttttagtttatttttatgtatggtggtgtgagataaaagtctaatctctaatttcattcttctgcatgttgtggatatccagtttttccaaaaccatttatttgaagagactgttctttccccattgtatgttcttggcacctttgttgaatgccagttggctctaaatacatggaattatttctgttctgtttatcccattggtctatatgtctgtttttatgctgatctcatgttgttttggttactttagcattgcactagattttgaagtcagatagtgtaatgcttccagctttgatctttttgctcaagattgcttcacctatttgggatcctttgtggctctatatgaatcttaggatttttttttctattactgtgaagaatgtcattggaattttgttagggattgtgttgtgatctgtagatttctttgagtagtatagacatttaaacatattaattcttccaatccatgtacacagtatatcactccacttatttgtatcttcttaaatttctgtcatcaatgtcttatagttttcagtggagagatctttcacctcatgggttaaatttatttctaagtatttatcttttgtagctaatgggatttaaatggggtttaaaaaattagttttcagatagtttgctgttactctgtaggaattctactgatttttgtatcctgcaactttactgaatttatgtattaattctaacagtttttcgatggagtgtttagggtttgctataaataagataatgtcatctgcaaaccaggacaatttgatttcttctccaatttgtataccttttatttctttctcttgcctaattgctttggccaggactcattactattttgaatagaagtggcaagaataggcatccttgtcttgttctgaatcttagaggaaaagcttttagcctttccccattcagtataatgttagctatgggtttgacatatatggccttattttatccaggtatatcccttctatacttaatatgttgagagtttttcacatgaaaggatgttgaattgtgtcaaatgcttcttctgtattagttgaaattatcatgtgatttttatccttcattctgttcatgtgatgcattacatttacagatttgcatatgttaactcattcttgcatctcctggatgaatcccacttgatcatgatgaataatctttttaatgtgctgttgtgtttggtattctagtgttctgttgaggttttttgcatctgtgttcttcagaaatattggcctgtagttttcattttttgtagtatccttgtctgtgtctggctttgatattagtgtaatgctggcctcataaaatgagattggaattactctgttctcttgaaatttttggaaaagtttgagaacagttggtattaattcatctttcagtctttgttagaattcagcgatggagccatcaggtcctgagcttcctttttttgctgggagactgtttattactgatccagtgttattactcattattggtttgttcagattttctatttcttgataattcaatcttggtaggttgtatgtgtcaaggaattattcatgtcttctaggttgtttaactgtttgaatataacggtctataacagtattttatgattctttgtatttctgttgtatcagttgaaatgtctccttggtgttcaggagcatattgtttaatttccatgtatttgtgaattttccgaagctttttctgttattaatttgttgttttatactattgtggttgaaaaagatacttgatactatttcagtcttcttaaatttgttaagacttgttttgtggcctaacatatgatctgttctagagaatgtttcatacacagttgaggagaatgtatattgtgcagttgttagatggaatgtcttatatattatttagtctagagtgtacattaagtctgatgttcctttattgatattctgtctggatgatctgtccattgctgaaagtgggttgttgaaatctcttactgttttttgtattgcagaatatctcttcagatctattaatgtctgctttatatataggtactttgatgttgagtgcatatatttacaattgttatagtctcttgctgaattgacctttttattatataatcaccttctttgtctctgaatttttttaattttattttttgtggacacatagtaggtgtatatatttatggggtacatgaggtattttggtaaagaatgcagtgtgaaataagcacatcatggagaatggagtatttattctctcatactctttgagagtattctctcatactcatattctctcatactcattctctcatataactctttgagttacacacaatccagttatatttttaagttattttaaattgtacaattaagttattattgactatagtcatcctgtgtgctgtcaaatactaggtcttattcattctttcaattttttttgtacctattaaccatccccgcctccccctgcaacccatcactactattcccagcccctggtaaccatctgtattagtctgttctcacactgctgtaagggtactacccaagattgggtaatttataaacaaaggaggtttaattgactcacagttttgcatggctggggaggcctcaggaaatttacaatcatggcggaaagggaagcaggtactttcttcacaaggcggcaggagagagagtgagagagagaaaagggaagagcccccttataaaaccatcagatgtcatgagaattcattcactatcatgagaatagtatgggggaaactgcccccatgatccagtcaccttctactaggtctgtccctcaacaactggggactacaattcaagatgagatttgggtgggggatgcaaagcctaaccgtatcatcatccttctactctctgtgtccatgacttcaattgttttgatttttagattccacaaataagtgagaacatacaatgtttgtctttctgtgcctggcttatttcacttaacataatgatctccagttcaatccatgttgttgcaaatgactggatctttatttttatttttttgagatggagtttcactcttgttgcccaggctggagtgcagtggtgcgatctcagctcactgcaacctccgcctcttgggttcaagcgattctcttgcctcagccttctgagtagctgggattatgggtgtccagcaccatgcctggctaattttttgtattttagtagagacagggtttcgccgtgttggccaggcttgtctcaaactcctgacctcaggtgatccacccaccttggcctctcaaagtgctgggattacaggcatgagccaccatgcccagctgacagatgactggatcttattcttttttatgattgaatagtcctccgttgcatgtaagtatcacattttctttatccatttatctgttgatggacacttgggttgcttccaaatcttagtgattgtaaacagtgttgcaacaaacacaggagtacacatatctttttgctacactgatttcctttcttgttggaaatatacccagcagtgggattgctggatcatatggtagcttaatttttagttttttgaggaacctccaaactgttctatatagtggttgtactaatttacatttccaccaacagtgtacaagggttcttttatctctacatcactagcatttgtgattgcctgccttttggatgtaagctattttaactggggtgagatgatatctcattgtagttttgatttgcatttccctgatgatcaaagatgttgagcatcttttcatatgcctgtttgccatttgtatgtctttttttttcttgagaaatgtctattcaaatcttttgcccgtgtgttaatcagattattcgatttttttcctacagagatgtttgagctgttccttatattttctggttattaatcccttgtcagataggtagtttacaaatattttctcccatcctgtgagttatctcttcactttgttaattgcatcctttgctgtgcagaagctttctaacttgatacggtctcatttgttcatgtttgctttgggtgcctgtgtttgtagggtattacccatgaaatttttgcctagaccaatgtcctggagattttccccagtgtttcttatagtagttttatagtttgaggtcttatacttgagtctttaatccgttttgttttgatttttgtatatggtgagaggggattagtttcatccttctggatatggatattcagttttcccagaaccatttattgaagagactgttctttctccaatgtctgtttttggcacctttgtcaaaaaatatttcactgtagacgtatggatttatttctgggttctctcttcagttccattggtctatgtgtctgtttttatgccagtcccatgctgttttggttactatagctctgtagtatagtttgaagtcagttgtgattcttgaactgcctcagcctcccgagtagctgggactacaggtgcccaccaccacgcctggctaattttttgtagttttagtagagacgaggtttcaccgtgctaggcaggatggtcttgatctgaccttgtgatctgcccgcctcggcctcccaaagtgctgggattacaggcatgagccaccaccacacctggccataaatgggattattttttaaaaattcttttccacgttgttgacaattggcatatgtaaatgctaccaatttttgtattgtaatttggtatcctgtaactttattgaatttgttgatgagttttaatagttttgtggtggagcctttagggttttccaaatataagattatgtcatctgcaaaaaaggataatttgacttctttctttccaatttggatgccctttatatctttgtcctgtctcattgctctagctaggacttgcagtactgtgttgattaacagtggtaacagtgctctagctaggacttctggtgctatattgaataacagtggtgatagtgggcatcctggttgtgttccagatcttagaggaaaggctttcagtttttctccattcagtatggtactagctgttggtctgtcatatatggcttttattatgttgaggtatgttccttctatctcaagcttttttgagggtttttaatcatgaagggatgtggaattttatcaaatgctttttcagtatcaattcaaatgatcatagtttttttccttcattctgttgatacgatgtatcacattgatagatttgaaccatccctgcatcccagggataaatctcaattggtcatcatgaatgatctttctataatgtattgttgaattctgtttgctggtattttgttgatgatttttgcgtgagtatttatcagagatattggcctatacttttcttttttttgatatgcgtttgtctggttttggtatcagggtaatactggccttgtagaatgagtctggacatttggaagagttccctcgtcctctgttttgcagtagttcgatttggattggtgttagttctttaaatgtttgatagaattcaacagtgaagtcatcggttcctgggcttttctttagtgggagacttcttattattgcttcaatctcagtacttgttattagtctattcaggtcttggatttcttcatggttcaatcttggtaggttgtatgtgtctaggaatgtgttctattcttctagattttccaattcattggcatacagttgcgcatagtaaccactgatgatcctttgaatttctgccatctcagtgataatgtctctgttttcctttctgatcttatttatctgtatctttttgctttttttcttagtctggctaaaggtttgtcaattttgttgaacttttcaagaaaccagtggtttgtttcattgattgttcattttttaaagtttcaatttatttgttctctgatctttattagctctttccttcaactaattttgggtttggtttgcttctgcttttctcatttttttaagatgcatcattagaaggtttatttgaagttcttcctttttttgatgtagacagttatagctataaacttccctctttgtactgcttttgctgggtttcggtatgttgtgtttccttaatcatttatttcacgaaatttttcaatttccttctcaatttcttcattgacccactggtcgttcaggagcgtattgtttaatttctctgtatttgtatagtttccaaaattcctctttttaacaatttctagttttattccactgtggtcgagaagatgcttgatattatttcagtttttttggaatgttttaaaacttattttgtgacctaaaatatggtctgtccttgagaatcatctgtgttctgaggaaaagaatatgtattctgcagccattggatgaaatattctgtaaatatctatgaggtccattaggtctatgatgcagattaagtctgatgtttctttgttgatttttttgtctagaaggtctgtccagtgctcacagtgggggtttgaaggtattattgtgttggggtttatctttctctttagctctaataatatttgctttgtatatcttgatgttccagtgttgagggcagatatatttaaaattgttgtatctttttgccgaattgatccctttatcattatatggtgactttctttgtctctcagagttttctgtcttgaagtctatttttccactataagtatagctattcctgctcttttttgtttgttttcttgtttcagttggcatggaatatctttttccatctctttattctccgtctatatgtgtccgtgtaggtgaagtttgtttcttgtaggcaacagatcaatgggttttgctttttcattcatttagccagtctgtgtcttttgattggagagtttagtccatttacattcattgttatcatttctaagtgaggatgtacttctgccattttgtaatttgttttctgatcttctttcttcccttcctgtctttctatagtgaagatgattttctctgttgctatgatttcatttcttgcctttttttttttttttgagacatggttttgccatgttgcccatgctgtaggatcttttctttatccttagcctttgggagtttgattatcaaatgccttgacatagtcttctttgggttaaatgtgcttggtgttctataaccttcttgtacttgaatattggtatctttctctaggtttgggaatccatttcaatacattttctaccctatctctttctctacctcctctttaaggccaataatgcttagattcgcacctttgagcctttttaaagatcctgtaggcatgcttcattgtttcttattctttttctttttggcttctctgactgtattttcatataacctgcctttaggctcactaattctttcttctgcctcatcaattttgctattaaaggactctgatctgttccttagctccaattgcatttttcagctccagcgtttctgcttaatctgaaaaaattatttcaatctctgttatatttctatgatagatttgtgaattccttctttgtgttatcttgaatttctttgatttttctgaacacagttattttgaattctctttctgaagtttcacatatctctgtttcttcaggaatggtccctggtgtcttattgagttcatttggtgaggtcatattttcctggatggtgttgatgctagtagatgtttttcggtgtctgagcatcaaagagttaggtatttactgtagttttcactgtctgggcttattagtacctgtcctttttgggaatgcttttcagatatttgaaaggacttgggtgttaatctaagctgtatctactttaggggcaagctcctcaagcccagtaatgctgtggttcttgcagactcatagaggtactgccttgatggtcttggataagatctgggagaattctctggattaccatgcagagactcttgttctcttttcttactttctcccaaacaaacattctctctctctctgtcctgagtttctcctaaacaaacagtctctctctgtcaccactccctggctactgcctatgttcactcaggctctggagctgtaccatcagcaggtggcaaagccagccatgcctgtgtccttccctttagggtggggaggtccctcagaccccagggttggaggttcagaggtgccatccaggagtcagggaccttagaattctacctgttgttctgtcatactgcccctgagctggcagttgaaccacaagacacagttcttcccactgttctctccactttccaaaggcagaggaacctcaccccataactaccacccacccaggctacgaggagtactgccagactaccataatattcctttaaggtccaagggctctgaagtcagcttgtgatgaatgcttcctggcctgggactcaggcttcagggcagtgggctccccatttggccagggcaggtttagaagtgctgtccaagagtcaagttctggaatcagggactataagagcccacttagtgctctacttccctgtggacatgctagaacctaaggtgcaagacaaagtcccctttacttttttctctgtttttctcaagcagaaggagttttttcccatagccactacagctagtaatgtgctgagtttcatcggaagccagcaagtctcaggggctcacccaaggcccttgatgtagtacctgggtatcactgctggttatttcatgtccaaggctcttcagatagcaggtgatgaacgctgctgggattgggttttttccttcaaggcagtgggttcccttttggctcaggttgtatctagaaatgtctaggagctatggcctggaatggggacctcatgattctgatggtgccctatcttgctttggcagagctggtatccaagatgtaagacaaagtcttccctactcttcctctcctctcctccagtggaaggaagggtgtcttttggagctgtgagctatgcagactggggttaggggaggggtgatactagcacacccctggctgccccagctgatgtctcagtatgtcatgtttccccccagtccactgtctctgggcctagttcatcactatgacttgcctaagagttgcagtccttatggtctagactgcctttcacatttacttgtacatagcactgtagcccttggtggcaaggtctgcaggaactcaaatttgtaccgctggggtcagggatttccctttggccagggctggtttaaatgctccctccatgggcgggcatcagcaggagttgggtcaggttttgctatctcctctaacaggacagcactaagttcagtgccccacagttgctgtgttctccctccccctgtgcccagtgatgcttaccccaccatgtcactgatgccaggggttatagaggggtggtattggcagttcaggactgtttttttttttttctatctcttcagtgcctctttcagcaataagaagttaaaaccaggactatgagtgttcgcttgatttttggttcttacaaaggttttctttttctgtgtagatagttgttaaattgatgttcttgcacaggggacaattggtgaagctttctattccctatcttcctccacctacctctccccttgtctctttttacacttttgaacttaaagtctgtgttgtctgatataaaaatagctactcctgctctgctttggtttttatttgcatgggataacttttctcttcactacatttttaggtaaagtgagtctcaggtgagtttcaggtaaacttttctccttactggtaaagtgagtctcttgtagggagctataattggggcgttgtgtttttgttttgttttgttttgtttttcttccattcagccactctatgtcttttgattgaaatactcaatccatttatattcgagatatttatctttagataaagactttttactgccatttggtgattgttttctttctttctttctttctttctttctttctttctttctttctttctttctttttctttcttttttgtagactttttgttcctgtcttactctcttttaatcttcctttgtgattaataatattttataatggcatactttatttccttactttttatcttttatgtatttgctatacttttgcattgtgattaccatgaggcttatgaaaaacatcttataaaggctgttttaacctgccaacagcttaactaactgcattaaaaaaaactttacacttcatctccttctcccatatttacaatttttgatactacagtttatatctttttaacctgtgtattcttttaaaaattattatacctattattgtttttaatagttttgtcttttaaccttcatactgaagatgtaagtgatttacatactgccattacagtattgcatattttgtatattttacatatttgcatatttgtacttacttttttcagtaacttttatactttcagatcagtatgttttatactttcaaatgtttttcttactaattaacattcttttctttcaggttgaagaactctttagcatttcttgtaagacagatctggtgacatgatattctttgatttttttccatcagttttataattttcctcatagatcatgtacatattttattggattaattttaagtacttcttgttattaatatgaatgatactgagttttaaatttaaaatttcaatggcttatttgtggtatgtagaaaagcagttgacgtcttgtatattgactttgtatacaggtaaccttactattcttggttattaattctaagaagcttttgtttgttttatcaaatctttggaaatttctgcatatgtcattatgtcacctgaaaataaagacagttttatttcttccttctcaatctgcatagctttcattttattttctaagtgtcttattgcatttactaggactttctgtacaatgctcaataggaatggtgagaagggacattcttgttctcttcctgatcttagcaaaaaagcatctagtttcttactattaacatgaagatgttagttgtaggtctttgtaggtgttctttatcaaggtgaggaagttcttttctattcttagtctgctgggagtttttatcatgaataagtattggattttgttaattgcttttattgatacgatcttaggatttttcttctttagctgttgatgtgatagagtaattaattgatttttgaatgttcctctgcggttatttagttagcactctttactttctcgtgccttgccattttgcttcatctattccctaataaaaatcttcgatcactatgtttttgcatctttaatatatgaaccaccagttgaagtccctgccttcagcttgctcactcttcaaaaacaggacatttgactgatttttgtctaaaaattttgatgtgggttttgatacagaaccattgaaaataaacggtatgaaggcataaattatatacaacagaatgaacgtattttgagtggtagttcaccaggtttgaaaagtgttatacatccacataatcaccaccagaattatgatatgaaacattttcatcaccccagaaactttctcttatgccctttataactcatcgtttcccctcacttgtggttcctggcaaccagtgatctattttctgtcattatagttttaccttttcttcagtttcatatacatggaatcacttagtacatagtcttttgtatctggcttctttacgtagcataatgccttttagatttatgtacatcatgttagcagttggttcttttttattgctgagtagcaatctgttgtatagatatgctgcagtttagtcatgagttaatggatgtttgggttatttctagctactggctatcgtgaattgttgcgggaagtcagggaccctgaatggagggaccagctgaagccatggcagaagaacataaattgtgaagatttcatggacatacattagttccccaaattaatacttttataatttcttatgcctgtctttactgcagtctctgaacataaattgtgaagatttcatggacatttatcacttccccagtcaatactcttgggatttcctatgcctgtctttaatctcttaatcccatcatcttcgtaagctgagggtgtatgtcgcctcaggaccctgtgatgattgtgttaactgcacaaactgttcgtaaagcatgtgtgtttaaacaatatgaaatctgggcgccttgaaacaagaacagggtaacagtgatgttcagggaacaagggagataaccattaggtctgactgcctgggagtcgggtggaacagagccatgtttctcttcttacaaaagtgaataggagaaatattgctgaactctttttctcagcaaggaacagccctgtgaaagagaatgcgttcctagggggaggtctctaaaatggctgctctaggaatgtctgaattatatggttgttgataagggataaaataagccccagtctcctgtagcactcccaggcctattaggatgaggaaattcctgcctagtaaattttagtcagactgattgtctgccttcaaactctgtctcctgataagatgttatcaatgacaatgtgtgcccagtggggcatgaaacttcattagcaattttaatttcgccctggtcctgtgatctcgctctgcccccatttggcttgtgatattttgttccccttgaagcatgtgatctctgtacccacaccctattcgtacactccctcccctttgaaaattgctaataaaaacttgctggttttgtggcttggggggcatcatggaaactgccgacatgtgatgtctgccccggactcccagcttttaaatatctctcttttgtactctttccctttatttctcagaccggccaacacgtagggaaatagaaaagaacctacattgaaatattgggggtggttcctctgataatgaataatgaatttgattacaatttttttggcaaatatatgctcccatttcacttggaaaaatacctacgaataggttcgctgggttgaaattaccaagctacttttccatccctaccagcaatagatgaatcagttgctctatacccttgttagcatttggccttactagtttaaaaaaatttagctattctagtgtgtgtgtgttgtggtatattgcagtattaatttgcatttccctaatgactaatgtttttgtgtatcttttcatgtgattatttaccatttgtatatcttcttggtcaagtgtctatttgaatatgttgctcatttgtaaattctgttacttgtcttactgatttattagagttctttatatatattagacaatttttttatcagatgtgttttgcacatatttctttcattctgtaatttgttttcattttctgaaaaatgtcttttgaagagtaaaagtttaattttatgaagtctaatttggcaattcttttcctttatgatttatatcttttgtgtcgtaataaatccttgcctaactcaatgtcacaaagatttttttcctttgctcctttagatgttttatagtttagattttacatataggtctgttatctatttgtttttatctataattgcaggtagaggttaaagttcctgttttttggcttaaaaaacagaaaacatttattttatggtttctgcaggttaggaattaaggagtggcttgtctgggcagttctggctaagactttctcatgaagaatcagatactgtctgggcatgtagtcacctgaacacttgactgggtggggcaagaatctccaaaagcgctcactcatatagcagtcaaaatgatgctgttgttggaaagtaacatcagtttctcttcacataagtttctttagagaggctgcttggttgtccttatgatataatgtctagcttttgccagagagagcaacccaagagaccaaggtgaaagtttcagtgccttatatttcctagccttagagtcatacagtattacttacacagtattctgtaagtcacagagttaagcccttatttacattgtgtgattctactgtattctatagaagacttccaagaacagtgatggggtcatctctatctcagctgacatgaatggataaagagaagagatcacatgcaggagattttgggggcagatctagaagctgtgcacattattttctgctaagcaagaaccacaggggcagttggggaatgtaattgagctgtgtgctcaaggagaagaataaataggtgtgagaagcatctaacagaaagttacttgaaaacaagatttcaggtaatgtcatccaaaaatgccattttttttagaaatgaaaaatacgtgtaactagaactgagagagaataaaattggtaaaatgacaggtgctactccataagaatatattatacacttcagtgtcacatcatttggccttttgctctaatttagtgaaaaacagttttcacgtctgtcctactatgtttgaagaaagataactgatttggtttaagaatctgttttgtggcatatatattagatatttagtatacgtagatttatattttactcattttagccctgagaaataactattatcatctgtatattatatataaggaagaagattcaaaaaaatttaagtaaatcatttgagatcatagggataataaacaaaattcaaatctatgtaaatctcacctgaaagcccatgatttttcatgataaacaaaataaagatactctcctttaaatcactgaatctatataactacactcttaattgcttaaaagatagtatttttaatgttccctttccagatgagacattctagatcttatatattcttaatattctggatctgtctgaaattgcagacttctgatagaaagatataattgaatataatatgaaaatagaacatgaaactgtatcttccactattgtttagggagctttcatcatatttggaagcatttttgcaaagtggtttcaagcatgcaaataaactagtatgttatcaatgaactctaggtatagattattttaaattatgtcatccagtagccacatatacttctttaaaggatcagttgtagaaaaatctacaactggaaaccaaaatattctcttcaaaatgtcttttagacaacaaatacacctttagtttattcaccatgcattttttatgataaattactcaatgttattaaaggcttgaaaaggtattttatgatccagtgataattactttagtggtgaagaaatctgaaagttgtgtggatatgctctataatggaagagtcatttacttatgaaaaacaacattactagtaaactgataaactaagaagtaaatggcaagccaaatgaccccacagttttggcgtgttattaacctgcaaattatccagaaacatcaactgctaggatcttaaaatcatgtaggcgaatcattggaaagtcatttttttttagtcttagtaaagagctaaattagatcaatattcattttttctcatggccattttgacagttgtcttgaaacagttatactgaaatgactacctcaaaatgtaagaaatgaggggtgcagaagagatagattagagatattctggagataaaattagtgaggcttataaatgaattggatactatagatggcagaagaaagagaggagaaagactcaaaggttataatgcaatttttggtttaggtaactggatgatcttgatgccagcaaatgagataggaaacacaggggggaggaagtgtgggtttggaggtgggaggaaaatgtattcagttttaaatattgatgagtttgagttcactgtggaacactgaaatggaactatttttcagttattagaaatagtcttaaactgtgagaaaaactttacaactggagataaagtcttcagagtcatcagtatgaagcaatgagaatggctgaaattatctttgaggaaaatgtgggagaggtgggttaaaagtagatgttaggacatcactaacatttaaggggtaggtccaggaagagaaagccctagctaaaggatctgcagaaaaatgatgacaatatgagagccaagacagggatagaataagggatggagattgtcaaagaagaagtgatattcggtgttgtcaaataaacaaggaggtttaataagataaagaccaaaatctgttcttacaagttcattagtttggggggattatggaacctctacaagggtgattttaataaaactgggaaagaaacctcattgtagtgcattgaggattgactaaagataaggaaggagagaacagtgtttaagtaactcttttaagaaatataagaagaggaaagagattagattgagaatactgaattatttctggccaagagaggacaattttagggtgtaaaagacttgagcttctatgtggttagaaaggaagaactaaaaatagagagaagttcacccatcctgcacttaaccatacagtttcctgacatgcttctgtgtcttagcaaatgctatttactctgcttagagttttttcaacaaaggcatgttaatagtgggggaaagaaagtaattttagcatcgtggcagtttctcagacatctttcaaaatattttctatgacctttttagtaggttactttggcaaattatatttaaaatgcaatgtggttggaacaagatggcagagtttctttcttcactgatagtacccccacaaaaacatcattttgcacaactatccacatatgaaagtaccttcataaaagctaagggaacctgaacatgcaaccaaggctgtaaagcccccatgaactgcaaagatgaataaactgtagttggaagataagattattggttctctgtgactaagatgcctctttctacaagccattacagtaccacacgtggaagtttctcctggactcatggtttctatattggaaaaaatgagttggagctgcacatttggcttccccacaatcctgggtcccttcacaggaggctcacttctgcactggcccattgggagcaacacaagtcctgatggggcccaaccatctgaggccagctaggaacaaacagaagatgtgggactagcagcagccggtgtgtggaacttggaagtggctcatgatacctgccataggagctgcactaaaggggccgtttatgggcatcatgctgcaagaagcacattccacagatcctctggacttgagggcctgactggctctcccacatggcctaggggcccttcagggaccttccgtgggtctatcctttgcatcagtgacagagccattgtgagactcgtgtctaacctgggcttagggtgccttctagcactgaaatagaatacagcagtcagctcagattcctaaacaagcccactaaaatagactgatcacaaacaaacctagactacaaagactagaataaatatctaatttgttaatgagtagacagagatgcatgtccacaaataataggaatatactaggaaaaatggcctcaccaaaaggacaaagcaaggtcctaacaactgatcctaaaccatgtagatgaatgatctggtggacaaagaattcaaaatagttctttgagtaaaactcagtgaacttctagaaaacagaaacaattcagaaatttatcagagaaatccaacagagaaattgggaatcatataaaaaatcaaatagaaatcctggagttgaaggatataataaacaaaatgaaaaatgcaatagagggcatcaccagcagaattcatcaagcagacgaaaaatcagctcgaagacaggctcttcaaaactatatagttggaggagaaaaatgaaaagtggaattagaaggtatgaagaaaactgttaggatttatggggcaccatcagaagagcaaatctgtgtatcattgatgttcgagagggactggagtaggggaaggggatagaaagctttttcaaagaagcaataaaagaaaatttttgaaaactggagaaatatacaaatatccaggtataacaagactagatttaccaatcaggtttaacccaaataaaacaactataagatatattagaaacaaactgccaaagacaaagagtggatattgaaagcagaaagagaaaagcaaataacaaataagggaatttccatactcctggaagcaggcttctcagcagaaacctgacagatgagaatgagtagaatgatatattcaaagtgctgaagggaaacaatcaaacaaacgagaaacctgtcaaccaagaatactgtacacagtaaagctattttttttaaatgaaggaaatctgaaggcattctcaaacaaaagctgagggaattccctgtaaccagatctgccttgcaaaaaaaggtgaagagagtttgtcatactgagagaaaaggatgctactgggtaacatgaaaaaaatctgaagatataaaacccacaggaaaaagtaagtgtccaggcaaattcaacatactctaatgcagtgattgtgggacataaaccacttatggtttaaccttcgttgttaggaagggttaaaagacaaaacaaaaataatagcaactacaataatttgctaaggtataaaaagatgtaaattatgtatataataaggtataataatataataaggtataaaaagatgtatataaaaagatgtaaattatgatatcaaaatatgaaatatgggagagcaatggagttagtgttttttttgaacaaaattgtcagcttaaaataatataactgtaagatgttttttgtaagtctcatggtaactacaaagcaaaacctttaataaatacaatacaaataaaaagtaagaaatcaaaacatactgatagagaaaacctcctacctggaaaggaagacagtaagaagagaggaacaaaggttctgcaaaacaagcagagaacaagttgataatatggcagcatcaagtctttacctattaataattaacttgagtgtaaattgattaaattcttctttgaaaagacgcagagtggctaatggatagaaaaataagacctaactatatgctgcccccaagagactcacttcacccttaagaacatgtgtagactgaaaatgatggatgggaaaaggtattccacgcaaatataaactaaaagaaagcagaaattcctatatttctatctgataaatggaatacaagtaaaaaattagaaaaagaggcaaacagggccattatgtaatgttaaaggggacagtagagcaaaaggatataacagttgtaaatatatatatatatatatatatacacacacatatatatatatatatatatatatatatatatatatatacccaacatcagagcacttaaatatataaagcaaacattaatagagctaatggaatatattggaatacagtaatagtagggaatttcacctcactttcaacaatggacagatcatccagacagaaaattaacatagaaaaactgaatttaaactgtactctatacccaatggacctaacagacatttatagaacattctgtccaacagcttcagaattcacattcttctcaactgcatatgaaacattctccagaatagatcatatcttaggctacaaaataaggcttaacaaattcaaaaaaagtgaaattatatcaagcgttttttctgactgtaatagaagttgaaatcaacaacaggaggaagtttagaaactgtacagatgcatagaaattaaacaatatactcctgaacaaccaatgagccaatgaagaaattaaaagggaatttaaaaaatttcttggccgggcacgttgtctcatgcctgtaatcctagcactttgggaggccaaggcaggtgaatcatttgaggtcaggagttcaagatcagtctggccaacacagtgaaatcccgtctctactaaaagtataaaaattagctgggtgtagtggcaagcacctgtagtcccagctacttgggaggctgaggcaggagaatcacttgaactgaggaggcggaagttgcagtgagccgagatcatgccactgcactccagcctgggcgacagagcaagactccatctctaaataaatatataaataaaagtttcttaagacaaatgataatggaaatgcagtataccaaaatagcaaaagcagtccttagagggaagtatacagtaataaatgccatcattaaaaaagaagaaagatctcaaataaacaacctaactgtctacctcaaggaactaggaaaactaacacgtctcaaggaactaggaaaacaaaattgagggaaggaaagaaataataaggatcagagcaaatataaatgaaataaagacttaaaaatacaaaaaaaaaaacccaggaaacaaaagtttatttttgaaaagataaaattgacaaacctttatgcagactaagaaaataaaagagactaaataaaattagaaatgaaaaaggaatcattacaactgataccctagaaatgcagtggatcataagaaactgctatgaacaattatatgccaacaagttggataacctaggagaaatggataaatttttgaacgcatacaacctaccaagcttgagtcaagaagaaatagaaaatctgaacagactgatgttgagtagcaagattgaagcagtaataaagcctcccatcaaagaaaattcaaggacctgatggtttcactgctgaattctagaaaacatttgaagaactaatacaaattattcacaaaatattctaagaaactgaaaatgaaggaactctttcaaacccattttatgagaccagcattgtcttgatttgaaaaccaatcaaagacacaacaaaagagaaaactacagactggttttcctgatgagtatagttgtaaaaaaaataaaatactagcaataaagattcaaaagcccattaaaaaggtaattcaccattatctagaaggattcaacccaggaatgtaaagatggtttaacataagcaaatcagtaaatgtgatacatcacattaacagattgaaggataaaactatgtggtcatttcaattgatacagagagagcatgtgacagacttcatctttttgtgataaagcttccagcaaattatgttcagaaggagtatacctcaacataaacaaggctagatatgataaaaccacagctaacatcatattaaacaaggaaaatttcataataataatttttttttaaaaaaagactgatttgaataataataaagctttggtctcctgcaaaaaaaaaaaaattgaaaactttttctctgatttctggaacaagatgtggatgcttacttttaccactgctattcaatatagtcctggaaattctagccagagcagttaagcaagagaaagaaataaaaggcacccaaattaacaaggacgaaatcaagttgtccctgtttgcagacaatatgattatctatacagaaaaccctaaagactccaccaaaaactcttagaactaataaacaaattcagtaaagttgcagaatacaaaaagcaaaatgcaaaaatcagtagcatttctatacaccaataggaaactatttgaaaaatcaagaaagaaatcctatttataagtcagatgcagtggctcatgcctgtaattccaacactttcggaggctgaggcaggaggatctcttgaaggcaagagtttgagactaggctgggcaacattgggagacgttgtctctaccaaaataaaaataaaaaaattaatagggcacagtggcacccacctgtagtcccagctactcaggagactgagggaggaggattgcttgggcccaggagtttggcactggagtgaattgttattgtgccactgcactccaccctgaatgacagagtgagactctgtctttaaacaaacaaacaaacaaacaaaacacctacctaggaatatacttaaggaagtgaaagatctcttcattgaaaattataaaacattggtgaaagaaattgaagacaatataaatgaattgaaagatatatcatgttcatggatggtaagaattaatatttttaaaatgtctatactacccaaagcaatctacagattcagtgcaatttctatcaaaattccaatgacattcttcacagaaatagaaaaaaaaatttaaattcatatggagccacaaaagaccctaaataggccaagcaatcttgagcaaaaagaacaaagctggagacatcatgctacctgattcaaaatctactacaaaggtatattagccaaaacagtatggcattggcataaaaaatagacgcatagacctatggaacaaaatagagagtcccgaaataaattcaggcatttacagccaactgatgtttatgaaaggtgccaagaacacacaatggggaaagaacagttttttcagtaaatggaactgggaaaactggatagctacatgtaaaagaatgaaactaggcccctctctctctctgtatgtaagtcaattcaaaaggattaaatacttaaatgtgagacttgaaactatgaaattgctagaagaaaacacaggagaaacactgtaagtgattggtctggacaaagatttattttagacaagacctcaaaaataagagcaacaaaagcaaacataaatggatctacatcacactaaaaagctcctgcacagcaaggaaaaaatcaacaatgaagagacagcctatgacattagaaaatatttgcacattatgcattcaatagcaaaaaaccccaaatagtctgatttaaaaatgggcaaaagatctgaatagatatttctccaaagatgacatacaaatagtcaacaggtttatgataaaacgctcaacatcactatcagggaaatgcaaatcaaaaccataatgaggtattgccttactgtggttaaaatgtctattatcaaaaacacacaaaaaatgttagtgaggatgtggagaaagaagaactctcttttttttctttttattttattattgttatactttaagttttagggtacacgtgcacaacgtgcaggtttgttacatatgtatacatgtgccatgttggtgtgctgtacccattaactggtcatttagcattaggtatatctcctaatgctatccctccccctccccccaccccacaaccgtccctggtgtgtgatgttccccttcctgtgtccatgtgttctcattgttcagtttccacctatgagtgagaacatgcggtgtttggttttttgtccttgctatagtttgctgagaatgatggagtctcgctctgtctcccaggctggagtgcagtggtgccaaaaactcaaatttcatggattgactttgttcttagtagaaaatctgtttgagaggaaatttgtgaagtagcaagagaaaaaggaaagcatggtaaagttagtatttcattatataggtgtgacagctggcacccagttttctcatttggttatttaagtgagcctaaacaagttgtcagtattcaaggctataattgtacagttgggtattttggcaagtcccaaatgtgtaattcaggctgtcataagtggacaatctaataaagtacatcttaagatcataagaatgttttttatattgcttataagttagttgaggaaggattggtcttcagtgttgtttatactctttgaaggcaattttatctaaatttttatttatttatttatttatttatttattttttgagacggagtctcactgtgttgccaaggctggagtgcagcagcatgatcttggctgactgcaacctctacgtctgggttcaagcgattcccctgcctcagcctcccgagtagctgtgattacagatgtgcaccaccacgcctggctaatttttgtatttttagtagagatggggttttcccattttggccaggctggtctcgtactcttgacctcaagtgattcaccctcctcggccttccaaagtgttgggattacaggcatgagccaccgcgcccggctgagaaacaggaactcttatatgctattggtgagaaggtaagttagtacagctgttgtggaaaacagtgtggaggttccccagaaaattataaaagttaaaaaaaaactgatccggcagtctcactactggagtatttatccaaaggaaatgaaatcagtatgtcaaagagacagctggacttccatgtttatttataatagccaagatatggagtccacctaaatgtccatcagtggatgaatggataaagaaaatgtattatacatacacaataaaatactattcagtcataaaaaggatgaaatcctgttatttgggacaatatggatgagcctggagggcattatgcaaagtgtaataagccaggcagagagacacaaatactgcatgatctcactcatgtgtggaatccaaaaaattgatctcctagaagttgtgagtacaatagtggttaccagaggttggggagaatgaggagagggtagatggggagaggctggtcagtgggtacagtgttacagttaggtaagaggaataaattctgctactccgttttacagtggggtgactgtagctaactgtaacgcatcggatatttcacatagctagaacagaggattttgaatgctttcccaacaaagaaatgataaatgtttaaggtgatcatatgctaattaccgtaatatgatcattacacaatgtatacatacattaaaacatcacattgtactccataaatatgtataattattacatgtcaacaaaaataagtaaaataaaaatgcgtttaatgcagagtggctgagtgaagagctcagcaagtccacttattccaaagtgacgattaaagtggattaaactgtcaaaaacagccatttcaggactttggaaagcgactaaaattatacaacagattgagaagcaattattcacgaaaaactactgaaccttatgtctatcatattttagcccctgaggctgctcccactacgcccattttcaccactgacttactatcatggtagtttttattagggtagggcaacctgtggaaaccagtagctttgctgttgatgctagggaaggctcacttgatctggagcagagcgtggaacaaccctatgtttccacagtattgttagaaacagtagtgatttttgtagcaaaggagtgggaagctcagtcttgcaagtagcatgagattataatcctggttggggaaagctacagattggccaggattttaacatggagatctgaggaattagtggagatcctacaattatcactggtcatctggaaggctctctattatgtgcaaggctctgcacacactcaggagaaaccagagagggcctgcctaactggtcatatgtccatgttgagaccttgcacatgtacaatgcagacatgtttccagaattctgtccctaaatactttcgcttctttcttttctgttgtatgaagggaatctgtgctccaggaaatgacggatacccgattctcccacaaaatctacagtcttttcttgtcagtaagtggcggcttttaggctccaagtataggaatttataatccaacctctgtctgaccctatgttttctgtactggattattgtgatacctcaaactggtcttcctgccttccagccttgtcccctcccctggagtctgtgttccacacaccagccatattcatccttttgaaatgtgtcagatgacattattcctcttctgaaaatcctttggtggcttctcattttacttagccaaagttctgtttaccatgattcacaaaaccatacataatcttgctgtctgagttttacttttctgacctaatgttctaccactctcagcctcataaattatacacttgtccttttgctgttcttccaacaaacaaaccagatgaactgctgcctctgggctattgcacttgctcttccctctctacctggagctctttttttccaccaaataggcacatggttctttctctcccctttttccagtctttctgtgaatgctatcttcttagtgaaatcttgccagctcagtaaatagtatgaataataataaatgaatgaatgaatagcaataaagggatagtaatgtcaatgaatgtttttcttttaaaataccttaaaattattcaataatgagaaagactagaaaagcagagataacatttctggaattgcactttaaaacatcaaaaacataaaatacaattttcaattaattattcttatatatggtccaaacaggagcaagtcactgaatttttgtttttctcttaaaattttttcacttctattcttaacagtttttcactatttgatatgtcaccttgtcttttgaaatatgtattagccatcacctatataaaaaaaagctacgaaaattacagagtaggaagtaatagtttcttttcttttatagatcaggtgtttcatacattttcaatacactttattattagttctgtaattgacattttgtcaacgcaaacatcaaaagttagagctggaggtggcataaaaatgctttcctgctgtggggaattagagtattcttttatttaattattttcaacaatttgcctgtcaaagcaaaagtggaagttcaagtcattctaaattgtcttgccttagcctgtaatttaactaaaaagggatacagatttaaagttgcttttaattttctgggagagatctaaagtaaaatgaattaaggtatctttgcctatctttcaaatgctgttcaaaaaatgaagtgtgttaaagggcattaatttgaataccaataatcttagcagaaagttaagtccaccaatactgttttatgaggattattttaaaattaatttgtcacctgtatatactcccacatgttctggattgcctctgttgaagttagagagctacttggttttgcttcatctgaattttaaactggctttctgtttgttggtctcatacttgcatttatacttgtaacatggatagtaaactgcaggaagaaactatttgaagagaacaaatgtctaatacattgtgctatcctaaaggctcagttctgggttagtgtgccctggaagagggcatatttgtgtattaatttgattcatgtaacaaatatttgtgtacctgctgtatttttagcactatgcttgattctgagagatgacaaaataattctatttctgttgcttaaaagacatatgcccaagtaattttaagtgtccaggttcatggtaacattaggtaagcttaacactttgttgtaccttttaggtttagtaaaatctgcattttttgttgttgtttttgtgtttgtattggctaaaatgctatcttaaaaaaattttccccctgagttgtcatagcttttactatagaaacaagtttgcaaatgaagattcttttttgagacagggtcttactcttttgcctaggctggaatgcagtggtgtgatcatggctcactgtagccttgaactcctgggttcaagtgaacctctcattgaacctcctgcttcagcctcctgagtagttaggaccacaggcatgtgccactaccccaggctaatttttaaattttttgtatagttgagatcttcttgtgttgcccaagctggtctggaactcctgggctcaagtggtcctcctgccttggctttccaatgtgctgggattgcaggtgtgagccaccatccctggctgaaaattgtttatacttggatgaaaaggaactagaggatatagaaaagaaatgaacttttaaagaaaagataatcatatagtgcttatgtgtggcaggcactggttaaggaaatgctttttaaactttaaatgtgcacatgcattacctggagatcttgttaaaacgaagctttattttataggtcaggggtagggcctggtctgctttcctaaaaaatgtctggataccactgctcctggttacaccatggtttgagaaacaagagtttaaattgcctacctatattagctcatttaatcctcttatcaactctatatggtaggtacaattattatatccattttacaaatgaagaaatatgtttccatgcaataatcttggcatgatagatgctgtttctttaccagataatttcagtgtttataaatgtgtgtgtgtgtgtgtgtgtgtgtgtgtgtgagagagagagagaaagagagagaaagaatggaggaggaaggactttaaagtattgttgtattattgcatttttacattatgtattctgacaaattaaaatgattaaaaatatatctgataaggaagaatatttgagaaaaagtggagggagagagtgtatttgtatttgttttctattgctgcataacagattaccaaaaaaaatttagcatcttaaatcatcacacatttactagatcacagtttccatgggtcagaagtctggacatgtcttagttgagtcctctgttcagagttcagatgactgtaatcagttttgtttagggctgtagtctctttgaggcttggggtgctcttcaaagctcacatgattttggcagaattcatttcgttgcggctttagaacccacggtagcttgcatattcaaggtcagcagaaaatctcagggaagagtagaaagtagaaaggataacattttgacatttgtgaaaacaagaattacatgtgcaagcagaatatgaagtatggttatgaggcagtgtttgaggttggagaggcagactgaaagcaggccatgaagagcctccacagaaacatagaacattatggactttaattgtataaagcagtggaaaatcactggagggatttgagctaggacatagcatgagcaaagattttcgtgaggaagattaagctggaagtaagctttgtaaaatgttaacagagaagaacctgtgatatgtaagtctcatttgaggggataaaagcctgaactagggtactggccctagaaatagaaaatgactgattttaagaaaattattgacatgaaaaggtgtctgagtcagacctctctttaattgccatattcaaggactgagttctgggttagcttgccctggaagaggctatatttgtgtattaattaattttattaatttaaaaaatatttgtgtacctgctatatttttagcattatgtttgattctgagatgacaaaaagttcctttaagattgcttatattttaaataggaataaacagtttaaatcattacagaagttaaggaatactgtgaaacattgcagtttgagttgcgtttgactcaaatatagtacatgccaaatgtgtggcttagatcctaagtgctgtgggactaattaagggtattatttgggctcttgacctttttctctacagataaccagtggtatttcaaaaaacaatttaaccatgcttgagtatgatagggtctcatatcaactagactcaagcatttaatgtgaattttctcccctgtgatttgtatttgatttaaagctctgaaatacaaaatagcaatgttaaatttatgattatagtctgttaaggtttaatcttattctagcctcaatcatatgtaatcattatgtattttaaaaatacaacaacagtttcttaagagtggcaattgacagcattcaacgaaagtatcttaaattttcaggtgtctgggttgtatatcttttaccagtaaaaatcctcatgcagttttaaggagtaattgacctttgacaaagaatatattttaatcacctcctgtagcaatgtttttgtcactggagagtttattatcctgtttttaactggtggaaaatttactgaaatgtagtgttttttttttttaagtggtactattcttgaatttggtggattgaaatttgattttaacctatttagtgtatgtgggaatgatttctattatattaaattgtaaggtatatagtctggtattttattatgattaataatatttatttattgctataaatatactctcatttttaatgaaattgttcctttggaaaagtgtaatattgtacacttaaaaattctttcatatttaacatttttgaagcaaataaaatatgaattggtactctgaaaggagcctcaggttgtcaaattaggactcctgagctaagaatgggttttgcacttttaaaaggttgtaataaaaaaagaagaaaagtgtgttacagagctgaaaatatttactatttggttctttacaggaaagctggctgaccccagtagtcacagcatatttgtgaatagatttaagtatgttttatgtaattcctgaaagtctgtgaaatgtactgtatgactatacttttcttgtgtacatatcatgttactttggtacattttattatataatagattttctttggattagtgcttcaaaataaacagttcttatacaactttttacatggatagtatttataatgaagttttagcgtatttctagtagaaaatatctttaaaaaattaaagtttttttttgcattttgaaacatgcagcgcaaaaactcaaatttcatagattgactttgttcttaacagaaaatctctatgaaaggaaatttgtgaagtagcaagagaaaaagaaaagcatggtgaagctagtatttcattatacaggtgtgatggcaggcacccagttttctcatttggtcatttaagtgagcctaaacaagttgtcagtattcagggctataactgtacagttgggtattatggcaagtcccgaatgtctaattcaggctatcataagtggacagtctaataaagtacatcttaaaatcataagaatatttttttatattgcttataagttagttgaggaaggattagtcttcagtgttgttaatactgtttgaaggcaattttatctaattttttttttttgagacggagtctcactctattgcccaggctggagtgcagtggcgtgatctcagctcactgcaacctctgcttcccaggttcaattgattctcctgcctcagcctcccgagtagttgggattacagacgtgcaccaccatgcctggctaatttttgtatttttagtagagatggggttttgctatgttggctatgctgatctcgtactcctgacctcaagtgatccacccacctcagcctcccaaagtgctggaattacaggtgtgagccaccgcacccttgaatgtaaaaatattttatgaagcttaagtttcaactttatagtaaatatgagttgtgactatgactttttgtattgtatgcttttagaaaagagttaataagttttatttttaaatacttctatttggttattaaattttttaggtttagtttttcttggtgacctcttttttcttttggtgtttgcacactaatgtcaaatttagttcacttagtactttgtagatatactatttacatgatatgaaacattattaatgtaaagagacattgccaagaattaagtgaacatgtttctctttatttctttctaatttgtttaaaactcttcctttgagaagttaagaaattagttctgaattagccagtaccccatggaatgttatccttagttcttccttttctttttttcttcaacttttaagttctggggtacatgtgcacatgatttgctgaaaagatcagtctgtcacctggatatgaagcccagcatccattagctattcttcctgatactcccccttccccactccccagacaggccccagtgtgtgtttttccctgccatgtgtccatgtattctcatcgttcagcttccacttatgagaatatgcagtgtttgcttttctgttcctgcattactttgctgaggataatggcttccagctccatccatgttcctacaaaggacatgatcttgttcctttttatggctgcatagtattccatgatgtatatataccacattttatttatttagtctatcttgatgggcatttgggttgattccatgtctttgctaattgtgaatagtggtacaatgaacatacagtgcatgtatctttataatagaatgatttatattcttttgggtatatacccagtaatgggattgctgagtcacatggtatttcttcttctagatctttcgggaattgccacattgtcttccacaatggttgaaataatttctcaacagtgtaaaagcgtctcttttccttcacgaccttgccagcatctgttgtttcttgacttttaaataatcaccattctgagtgacgtgagatgatatctcattgtggttttgatttgcatttctctaatgatcagtgatgttgattttttttttcatgttagttggctgcatgaatgtcttcttttgagaagtgtctgttcatgtcccttgccactttttagtggggttttgttcttgtaaatttctttaagttcctggtagactctggatattagattgttgtcagatggatagatagttctttcttaattcatgttattttcatgtgatgataatgtgtatacaactgtccatcatttttctaacttcagtgtgataagtgcctcacttcgcaactccccaaattctgaatgctaatatgatgcatctttgccatgcttcgtgttacaaaatgttgcttgaaagatgaagattaaaattaatttataatttatcttagagacattggcaccatgctggttgtatgatttctttatcaacacttctgtaagtgttgtagaataggatggcattggataggagagaatattagaagtaggagggaagttcagtttaacaacttggatgaaaacttgaccgcttactcatgtattttattgacattgttcagagtacatgttttgcacagatgttttatttaaaatccctgaagtttgaactgaaatggaacttttcctgtccattaaaatccttttttctacttaatgtaattcatagaataattgggaattgggtgaaaatctttgatttctaaagttttaagctattaaaaaatttcattcttatctttgtttttcaaggcaaataattatcttatgacctgaagatttgttttgcttaatgaaatgtgtttcaaaaggagagaaatcttacatatctacatgcaaagtagtcgtattctgaaaaaagttacacactgatacttatctgaaggttggaaggcttaatttaagtatctttcttgataagtacaaccagcctttaaatgatggataactgaactctgtacttgaagggtcagtggagctggctaaatgttacagtttttcatagaaatttgacttaatttttaaaatctttcaatttatgtgtaagtatattttcctaggtggttcagtaaagcgtgtgttttaaaagattgtctagatgcagcatgctaaaagagggaggtaagaatgtttattcattatggctacagtttaatatgttaatatgtttaatacatattaaacattaacattttaacattttaatcaataacattttaaatggtagcctaataaagagaggggattggtcagaaacaggatagagttcttattgttgttgactaatgataaaccaaatgcaatagaaaatccccaagtggattttctctgagataaactgataatataatagcattttctatttttccctagtaagtattgttgatggttgtcagttcgtttttcccaagcacatgaattagctaacgtgattctctgtactaatcttagtttttgactgagaatatcatgtacttaaccaaatctttgagatatttaaataaattaacaaaactgtaaaaatcatctttgtaaagctagtcactgatttatgatttgggaagataagcagctttgtattacttagaaaacaaagaaaaatatgtagaatttctgttttttcttttttattgtttaaaaatttaaatcaacatcagtgtgcagatgggtagataaaataaaaatttaaatcaacagatgtaaaatggaccattcctcttccctgcccaccaattctaattctcagaagaatttttttttttttttttgagatggagtcttgcttgttgcccaggctggagtgcagtagtgccctctcggctcactgcaacttccgactcctgggttcaagtgattctccttcctcagcctcctgagtagctgggactacaggcacgtgccaccatgcccagctaatttttgtatttttagtagagacagggtttcaccatgttggccaggatggtcttgatcttttgacctcaggtgatctgcctgccttggcctcccaaagtgctgggattacaggcatgagccactgcacctagccagaaattttttttaacagtttatgtattgttttccaagaggaatattctttatatcctgcttggcaacttgtttttcacctcaaacaatgttatgaacactacattaaacgatttctccctctttaattgcacagtattctgtggtgtggatatagcataattttatttttccatttctcttttgagggtcctataatcattttccctttttatttcctgctattacaaatatacaaatagtatgtactctgaaacacaaacacatatctggaattgaaattgttgtggtatggagatctgtttttgtataggtagtaccaaatttctgtccagaaagattgcaaatatatgccctttcctattgtgtatctgagtaccctttgtctcataaatttgccaacagtagatattatgtcttttcaatttttaccactctagttcacaataaatatctcattttgtttacatttccctgattacaagtgaggcttagcaagttttaaatatttatcgggctaatacatttgattttttaggtagcctatatgctgtaaaacctcattaagaactgctctttctgtcagagatttaatttgacaatacctatagtcaaattttaaaaatctgattgggttcattagtctgcctgcatattagtctaaaagaaagtcagaaaagtaggggaagagccatgaaaaatcattccttctttcccttcaaaaggagtgggtactccttttggatttttatctgttaagcagtctatattgttttgggctctcagcacattatagatttacagatcaaaattactaggaaaaccagaaataatccatcctgtttgaggggaggggatttgtgctttcccctagaagtctcttcctttctcttagatgtttattgagtgtcttctctgccagcactgtagctgtgtagctgctggccatttaggcctgtttcatccctgactgacagcagctttacttggtgtggtggcaataaatcaaatcaaaatgtagtgccattagagtaagacatcttaatcatgtttcaactgacctaagaaatttaaatgttctggaggatgatctctagtgagagctggagaccttatagtttgtcaggaatgttaaggtatatagggtgtctaaaagcatatagtacttgaaacttattttcgtggtgatctctggagaatgctctctgtaatgataataacaacaataggagttagcttttattgagcatttacacctgcctgggattactgtcagcattttacatctgttctgcatagtgtgaggaagtactttctggcctttggactttcgttctcataagtagttgtagaaggtctgcggctacacaaagtctacttctttagggaccttgtgtctaggagtgcttgtatagccattttaccctcttttgctgcctatttagtgattaggattcagactaaaaaaatgatttagtgattaccttggtgtgatcattcacacatcatggtgatagtgatacagctgcatattttcagtgaatctttgaattagaagagatagagtcatctactgcttccctttttctgaaatagaatccctataataccttgtgagtgcactggccactgtggaaacaggctgagtgactgattcacaatggaattaattccactttctagttattaataataaggaaaatatgtatgaaacactttgtgaattatccacttaccagaagctttttaacttgatgtgatcccttttgtccatttttgccttggttgcctgtgcttctgggggtattactcaataaattgttgcccagaccaatgtcctcgagagtttccccaatgttttcttattgtagcttcataggttttggtcttagatttaaatctttaatccattttgatttgacttttgtatatggtgagaggtgcctagtttcatccctctgcatatggatattcaattttcccagcaccatttattgaagagactgtcctttcttcaatgtatgttcttggcacctttgtcaaaaaagagttcactatagacatatggatttatttctgtgtcctctcttctgttccattggtctacatgtcttttatttaatgccaaccccatgctgttttggttgctatagctctttagtataatttgaagtcaggtaatgtgattcttccagttttgttctttttgcttaggatggccatggctagtctgagtcttttgtgattccatataaattttaggattgttttttctatttctgtgaagtatgtcattggtattttaaaagggattacattaaatctgtagagtgctttgggtaatatggacattttaacaatattgattcttccagtgcgtgaacgtggaatatctttttattttttggtgtcctctttgatttctttcatcagtattttatagttttcattatagaggtctttcgcttgtttggttaagttaattcataggtatttaattattttttagattgtttgctcttgacttacagaaatgctactgattttttatgttgatttttgcattctgcattttactgaatttatcagtttgaatagtttttttggtagagtctttagtttttccaaatataagatcgtatcatctccaaagaaagataattggcttcttccttttcaatttgagtgccctttatacctttcttttgtgtaattgctctggctaggactttcagtactatgtcgaataactgtggtaaagttgggcttccttgttgtgttccactatcttagaggaaagactttcagttttcacccattcacagtgatactagctgtgggtcttttgtatatggattttattgtgttgagatatgttgcttctgtatccagtttttttttgaggggttttatcatgaagggattttgaagtttatcaaaattttttaagcatcaattgaaatgctcatatggtctttgtccttcattctgttgataatgtatcagattgattgatttgtgtatgttgaatcatacttttatctcgaggataaatcccaattggtcatgatgaatgatctttttaatgtgttgctgagtttggtttgcctagcattttgttgaggatttttgcataattgttcaacaggaatattggcctataattttcttttttaaatgtgtttttggttttggcatcaggacaatactggccttgtagaatgagtttggaagtattcctttctcctcctttttttgaaatagttccaatgggattgatattaattcttctttaaatgttgggtaaagttcagtgatgaagccatcagatcctggacttttctttgctgaagactttttaattacgactttgatctcattacttcttattggtctattcaggttttggatttcttcatggttctatcttggtaagttgtctgtgtctgggaatttatccatttattctaagttttacaatgtattgacacgtagctgctcatagaagtctctaataattcttcaaatatctgcagtattggttgtaatgtcttctttttatctctgatttcatttatttggggcttctctttttttttcttagtctgtataaagttctatcaattttgtttatcttttaaaaaataacttgtcattttgttgatcttttgcatttttttcatttatttctggtgtgatatttattatttcttttttttctcctaattttaggtttgatttgttcttgcttttctagttctttaagttgcatcgttaggttgtttgatgttttttctacttttttgatgtaggtgcttatagctataaactttccttttagtactgcatttgctgtatcccataggttttagtatgttctgttttcattttcatttgtttcaataaattttaaaatttccttcttaatttcttcattgactcactggtcattcaggaggaagttgtctaatttccatgtgtttgtatagttcccaaagttcctcttgatttttagttttatttagttgtgggcagagaagacacttgatataatttcagtttttaaaataaatttaatacttttttttggcctaactgatgacctatccttgtgaatgatccatgagctgaggagaagaatgtatattctgtagccactggatcaaatgttctacaaatgtctgttaggtctatttggactgtggtgcagattaagttccatgtttctttatttactttctgtgtggatgatctgttcattgctgaaagtggagtgttgaagtctctagctattgcattggggctgatctctttctttagttctaatatttggtttatatatctgggtgctccaatgttgggtgcatatatatttacaatcattatattctgttgctgaattgacccctttatcattacatagtgacccctctttgtgtgtgtgtgtgtgtgtgtgtgtgtgtttttttctttgagactgagtcttgctctgtcacccagactggagtgcagtggtgcgatcttggctcactgcaagctccacctgccgggttcacaccattctcctgcctctgcctcctgagtagctgggactacaggcacccgcctccacacctggctaatttttttgtattttttagtggagatgcggtttcaccgtgttagccaggatggtctcgatctcctgacctcatgatctgcccgcctcggcctcccagagtgctaggattacaggcgtgagccatacagtttttctcttgaaatctgttttgtctaattatagctcctcctgttctttgtggcttccatttgcatgggatatcttttctatccctttattttcagtctgttttgtgtttttacaggtgatgtttatttcttgtaggcaacagatcattgggtcttattttttaaatccatttagccactctatgtgtttttattggagagtttagtccatttacattctgtattattattgataaatgaggacttattcctgacattttgttatttgttttcttgttgttttgtagtattctctttcttcctatcttcctttctgtgaaggttattttttttggtggtgtgctttgagtttttgctttttattttttgtgatcttttgtatgttttttgacttgagttaccctgaagcttgtaaataatatcttataacccactattttaaactgatgacagcttaacactgattgcaacaacaaacatactattaggttggtgcaaaagtaatcgcagtttttgccattactttcaatagcaaaaactgtgattacttttgcaccaacctagtaacaaacaagcaaaaagaaaactaataaaaaatccacactttaccttcatttgccccacttctaaactttttgttgtttctatttattttttatttatttatttattttttttaatttatttttttattgataattcttgggtgtttctcacagagggggatttggcagggtcatgggacaatagtggagggaaggtcagcagataaacaagtgaacaaaggtctctggttttcctaggcagaggaccctgcggccttccgcagtgtttgtgtccctgattacttgagattagggattggtgatgactcttaacgagcatgctgccttcaagcatctgtttaacaaagcacatcttgcaccgcccttaatccatttaaccctgagtggacacagcacatgtttcagagagcacagggttgggggtaaggtcacagatcaacaggatcccaagacagaggaatttttcttagtgcagaacaaaatgaaaagtctcccatgtctacctctttctacacagacacggcaaccatccgatttcccaatcctttccccgcctttcccgcctttctattccacaaagccgccattgtcatcctggcccgttctcaatgagctgttgggcacacctcccagacggggtggtggccgggcagaggcgcccctcacctcccggacagggcggctggccgggcggggggggggctgaccccccccacctccctccaagacggggcggctggccgggcggggggctgacacccccacctcccggacggggcggctggccgggcagaggggctcctcacttcccagtaggggcggccgggcagaggcgcccctcacctcccggacggggcggctggccgggcgggggggctgacccctcccacctccctcccggacggggcggctggccgggcagaggggctcctcacttcccagtaggggcggccgggcagaggcgcccctcacctcccggatggggccactggccgggcaggggggctgaccccccccacctccctcccggacggggcggctggccgggtggggggctgacccccccacctccctcccggacgaggcggctggccgggcgtggggctgacccccccacctccctcccagacagggcggctggccgggcagaggggctcctcacttcccagtaggggcggccgggcagaggcgcccctcacctcccggacggggccactggccgggcaggggggctgaccccccccacctccctcccggatggggcggctggccgggtggggggctgacccccccacctccctcccggacgaggcggctggccgggcgtggggctgacacccccacctccctcccggacagggcggctggccgggcggggggctgacccccccacctccctcccagacggggcggctggccgggcagaggggctcctcacttcccagtaggggcggccgggcagaggcgcccctcacctcccagacggggcggctggccgggcggggcgctgacccccccacctccctcctggatggggcggctggccaggtggggggctgacccccccccacctccctcccggacggggcggctggccgggtgggggggctgacccccccatctccctcccggacggggtggctggccgggctgaggggctcctcacttcccagtaggggcggccgggcagaggcgcccctcacctcccggacggggcggctggctgggcggggggctgacccccccacctccctcccggacggcacggctggccgggtgggggggctgaccccccacctccctcccggatggggcggctggccgggcggggggctgaccccccccccacctccctcccggacggggtggctgccgggcggagacgctcctcacttcccagatggggtggctgccgggcggagaggctcctcacttctcagacggggcagctgccgggcggaggggctcctcacttctcagacggggtggttgccaggcagagggtctcctcacttctcagacggggcggccgggcagagacgctcctcacctcccagacggggtctcggccgggcagaggcgctcctcacatcccagatggggcggcggggcagaggcgctccccacatctcagacgatgggctgccgggcagagacgctcctcacttcctagatgtgatggcggctgggaagaggcgctcctcacttcctagatgggatggcggccgggcagagacgctcctcactttccagactgggcagccaggcagaggggctcctcacatcccagacgatgggcggccaggcagagacactcctcacttcccagacggggtggcggccgggcagaggctgcaatctcggcactttgggaggccaaggcaggcggctgggaggtgtaggttgtagtgagccgagatcacgccactgcactccagcctgggcaccattgagcactgagtgaacgagactccgtctgcaatcccggcacctcgggaggccgaggttggcggatcactcgcggttaggggctggagaccggcccggccaacacagcgaaaccccgtctccaccaaaaccagtcaggcgtggcggcgcgtgcctgcaatcgcaggcattcggcagactgaggcaggagaatcaggcagggaggttgcagtgagccgagatggcagcagtacagtccagcttcggctccgcatgagagggagaccgtggggggagggggagggggagggggagggggaggggttgtttctatttatatcttattatcttgtctaactcttgaaaagttgtagttatttttaacaggttcatctttctacccaaaatgtgagtagtttactagtttacaaagcacaattatagtgttatcattttctgtgtttgtgtacttactattactagtgagttttgtatcctcagataatttcttattgttcattaatgtccttttccttcagattgaagaactccctttagcatttcttgtcggacaggtctggtgttgataaaatctctctgtttttgttgatctgtgcaagactttatttctgcttcatgttggaaggctattttcactgaatatactatcctaagattttttttttcctccagcactttaaaatgtcatggcactctctcctgtcctgtaaggtttccactgagaagtctgcttgccagacatattgcagctccattgtatgttgtttctttattcctgctgcatttaggatcctttctttattcttgacctttgggtgttagattgacctctgggtgttatacaaccttgacctttgggtgttttgacctttgggtgttagacaaccttaaggttgtcttctttgagttaaatctgcttggtgttctataacctttttatacttgaatatttttatctttctctacgtttgggaagttctctgtgtgttttttttgttttgttttgttttgttttgtttgagatggagtcttgctctgtggcccaggctggagtgcagtggtgccatctcggctcactgcaagctccacctcccgggttcatgccattctcttgcctcagcctcccaggtagctgggattacaggcgccggccaccacacctggctaatttttttgcttttgtatttttagtagagacagggtttcactgtgttagccaggatggtctcaatctcctgacctcatgatccgcctgcctcggactcccaaagtgctgggattacaggcgtgagccaccacgcccggccgggaagtactctgttattatccctttgaatacacattctgcaactgatctctctctctctctgcctcctctttaaggataattactcttaaatttgcccttttgaagctattttctagaccttgtagttatggtgcattcttttttattctttttttcttttatctcttctaattgtgtgttttcaaataggctgtcttcaaggtgactaattctttcttctgcttgatcaattctggtgttgaaagactatgattcattcttcagtatgtcagttgaatttttcagctccagaatttttgcttgattttaaaaaaataatttcagtctctttgttaaatttatatgatatgattctgaattctttctctttgttatcttgaatttctttgaactttctcagagcagctatttcgaattctctatttgaaaggtcacatatctctgttacttttggattgattgctagtgcttcatttagttcatttgggagttgatgatttcctggatgatcttaattcttgtggatgtttgttgggtgtctgaacattgaagagttaggtatttattgtagtcttcaagtttggatttatttgtaccagttcttcctgggaaggctttccatgtattcaatgggaattgagtgttgtgagttaagtctttggtcactgcaggtatatctgcgttagagggcaccccaagccatgtaatgatccttgtggaattttagaggtacctctttggtggtcttcggtaagatccaggaaaattctttgtattagcaggcagagactcttgttctcttcctttactcttctccaaagagattctctctctgtgtgctgagctacctggtgtttggggaggggtgacacaaccatttctgtggccaccacctttgggactgttctttatcagacctgaagccagcatagcacaggatctcatccatggcctgtggctctattgcctggctactgctgatgtttattttaggcccaagtgctcttcattcagcaggtgatgaatcctaccaagagtggattcccttttcccttttgacctagagtgtgtcgtgaaatgttatctgagagcgagggcctggaatgggggcttcaggactctgcttggtgctttattttactattgctcagctggtatttaagttccaggacaaagtcctctttactctcccctcttatttcctcaaattggaaggagtatccaccaaagctgcaagctgtgctgcctagaattacaggaatggtgacataagcactcccttggctgccctacctagtgtctatctagatcacttgcacctcatgtctccttgctccaagcccagcatagcaccaggacttccccagggattacagtccttgtggcctagactgcttttcaagtttatttaggacccctaataaagtttcaagtttataaggacccagagtgctttagcccgtggtggtgggtctacctggaactcactgactgctgggatttcctcttgctagggctggtctaaatgctccctcctttggcatgggctgaattttgtcctgtgttactttctgctgtaatagggcagcagtgagttccaatgcaaagtttcacagtcactgtgctctgtcttccccaagtacatggattctgtctctgcaacacacaggcactatccagggatgagggagtgatggtgtaggcagttcaagaccatcttttttcctcactgcagtgcctctttctttgatagctactctttctttaccatgtctggtattcgaatttgctcagtaactcattttggttcttttcagcagtacaaatagactttaggaggggattatacaaaaatctgaatggagatatgaatgtggtctcactgttacttccttgactatctgatttcatgttgttgttttggctagtattgtgggcatttctcttttattattgctttgtattcttccttttagaattccatgcttggttgaagacagtgatctgcccagttagagatgggctctaacatctaacatctaacagatgttaacaagcttctttttcatccattagttacgtttgagctatcttgatgggttctttcttctcttccaccactttgcttcttttttttttaaattcaatttaatttttattaattttattaattaattaatttttaccttgcagctccagctcaaaggaagctttgcttctagtcacctccaacacttgcttaatttttttattctaattgattggctgccttataagaagctgttctttgaataatatgtttaaaactaattctttctgtagctatttatgtatgttctttcctatcatctgcaaagtgcttctctcctttgccacttcacaatttactttaaaaaaagagtcatagataataaattcaaatagatattcctaagttactgaatgatagccatatgctacccttatgattaagaaagcattttcctcccattttgtaggttgcctgttcactctgatggtagtttcttttgctgtgcagaagctctttagtttaattagatcccatttgtcaattttggcttttgttgccattgcttttggtgttttagacatgaagtccttgcccatgcctatgtcctgaatggtattgcctaggttttcttctagggtttttatggttttaggtctaacatgtaagtctttaatccatcttgaattaaattttgtataaggtgtaaggaagggatccagtttcaactttctacatatggctagccagttttcccagcaccatttattaaatagggactcctttcctcatttcttctttttgtcaggtttgtcaaagatcagatggttgtagataaggatgtggagaaataggaacacttttacactgttggtgggactgtaaactagttcaaccattgtggaagtcagtgtggtgattcctcagggatctagaactagaaataccatttgacccagccatcccattactgggtatatacccagaggattataaatcatactgctataaagacacatgcacatgtatgtttattgcggcactattcacaatagcaaagacttggaaccaacccaaatgtccaaccgctatagactggattaagaaaatgtggcacatatacaccatggaatactatgcagccataaaaaatgatgagttcatgtcctttgtagggacatggatgaaactggaaaccatcattctcagcaaactatcgcaaggacaaaaaaccaaacactgcatgttctcactcataggtgggaattgaacaatgagaacacgtggacacaggaaggggaacatcacactctggggactgttgtggggtggggggagtggggagggatagcattaggagatatacctaatgctaaatgacgaattaatgggtgcagcacaccaacatggcacatgtatacatatgtaactaacctgcacattgtgcacatgtaccctaaaacttaaaagtataataataataaaatttaaaaaaaaaagaaagcattttccttaatattgttagctgttcttcagataagatgtttgactgccctaggtctcgagtatttttgacgggtttcaatgattaatgatacgtttttattaatcacttatgcttagcaactgcagggattttttaattaaaaacttgttattagattcagaatgacagtgatgatgcttaagttgggaaagaaatcatttgagttgtggtcttttctaccttgaatcttctctctgtaataaatcaccctgcttttgacagtgggaaatgttataatatttaagaaattaaagatgatttgtgttagctttaatggtttacatttgtatgtcagcttttctgtagaacaagtatagtattctgattctgtcatttgagaaacgagagattatattgcatttaaggtcatacacatgtggttttggtctttcacagttcaggatgacctaatttacatggaggtaatgaaaatagatcacttttatattattctagttagacaagtatcattattaccttttcagatctgtgcttcttcctacaggtttgcatgattaataaggttttgggtttttttcccctggtgtggttagaggaaagtttatagaacctattgttgcctatattattttaagcaaggatttgtttactaaaaacagtaaaattaagagaaaaatctctgaataccttcaatcacaacattttatttgtgttctacttggtagcttttaaagtaattctctggttaaaaaaagaaaaaaaatgagattttgtgtgttttcaccccaattttgtgatttatttttaactttatttgaaaacaaaaaagaattgtgtgtatagatatttcttttataatgtcaattaatactgattctgaaaatttccttttattattaggatgaaaaacattgctaatagaaacacaattttttttttcaaagcagagagtgaccaaagttgagagaaacagccctgaaattattttgattgaagtatcatacatatttattttgtttgatctaaaaatttacatctattgtatcctattttggtgttgcacaattagctactgatctctgcatgttaaaaatcagtggataataagagataaaacaaactgggaatgtgtttttagttacctttgaagtgataggcataaaacagaagactcaataacaataatagtaattcaaagaatgacagctaacacttggtactactgtgtgtcagttactatgtttagtacttcatatatattttcatttaatttttacaacactatgtaattgagagtattatttccattgagcacatgtttagattgaagaaagtggtagtcctactgtatgggtctgatgacatcttgtatactctgtgtagtactggtttttgaaggataacagtaaactgcagtagatgaggaaaatgttcatgaaagggagttgaagttaggcatattaaaggagacttcaccaaattctgctccctaagttaagcgtagtctctcagagatctcttctaatgttaaaatttatagaggaagttgggactgctagttaagaatgttttaacttccattcttaacatcttcatactttcccaaagtctcagtcaaaagataaagtgtcctcttgatcagtcacatccccaaatctgggcactttcatattcttaaggaatgtacacaattctttgtctttgtctctctattgtttttcctcaccctaagcgtgtgaacatattccaaaaataaagcactaataaaaaaattcttttatttatttcacattcgagtgtcatgtactagaagctactatataaagacaaataagatatagtcccagcactcaaagagcctggcttctaggaaagagaaaagacatgtaaacatgaatgttgtagatattaaacacacaagtaaataaaaccaaacatgttttcattaaagttttatatgtattatagtagaagtctacataggagcaaaaaggaaggactggccagttttccaggaaatggaggttgataaagggagcataaggcttgaattgactctgcaattctctttagctatattaacctgtctctcatctttctatatttcctgagttgggtaaagaaaagtatacatttaatgtctccactttcctctcatgtattcctcaaacctgtgccagtaggcattcaagtttgttaaatgataatggcttatgatagctaacatttatagagctcttgccctttgccaggcaccctaataacatgtttcacatatagtaacttgcttatttcttacagccactctctaagataagtactgttatcgtccccatgttagatacagacaactgaagcacagagaggttaaataccttgaccagtatcacaactaataactgttggaactgggcttcaaatctaggccgtttggctttgggacctatgcattatgagtgactggcgaacaaaattctctaaaaaggaattcgaggaaaagagacttttttttttttccagtgaacagtttgcaaaccagggaaacatagccttcggtgtaaaatgaagaatgcatttcagagaacaaagagaaggtttggattttatagaaaaatatgcttcccaaattcccaatcaggtccatttatgcaaatgaaagatttaaattcatgtagttccaaatagttggcacagtggagttctgagtcgttgctacaactgagccctcattggctgtggcaggtgagtcctgattggttgatttccaagctctaaaccagagatctctgtcagatgtttctttcaaatggctggcgggtggtgtagggtttttggtttatttatcttggcacagacatcaggaactggtttggcttgattgtagaaagggagggcctgtgacactttcacatctttctgagaacacagagtacgtgactgcttcttcacccaggatggcctcctggttctgttttactttgagcatctcagccacagggagtccattttgtctgttggataggggtatactttaacagactgaatgaacctagttgccttttacccatgtctgcacacaaatgcttatatactaaagttcatttatttccaaggcatacatttttcctagttttaatggattttcctttgtcctctcccttcactcattcaggaaattttgaatactcttatggccaagtactaatctagcattggaaatacagaaataaaagtggccactactatcacgaagctcatagtatgatgggagaaaatgtagaggaaaattataattataatatgacgtgctaagtgctatgatggtatgggcctaggggggcagtatttaacccagccagaagagggtaacccctaacctgaattatgatggaaaagtaggatttagctaagcctctttctattatttgtcctccctatttttttctatgtataatgggatacagttgctttttcaaaaccttcaattacccctttacgtatctgcacggttgcattgttccttctgttatcttctttgtcatgttctacttgcaagccttctcggtgtgtcttttactgtactttggtctccagtgtctttttcattcttatttcctttttagtttattcatcctatctagaaacttgtcttatctgctacagtaggaaatttaatttacttttcttcagctcctttcttcctctctggcaggctgccaagtgtttaaaacactcatgattattggtttcttcagagaggaagatagatctgggtcatacgcttgatgtcactgggatattcatttcatttttgttctttctgggcatcaaggggaattttaccccttgaagtctctcaattaaatcttgcccccaatttactgtttcttgggcatgttcctttaatgcgcctagcttttctatttttggcatgagtgcccaacatttactggatattggcacttggcacacagactggtgtctgctgaatgccagatatagccttctttacaaaacatgatgggaaaaattatgagggaaggtagtatttgactctggattcaaacacaggttgaattctaaccttttatcatttattagcacggtaaccttgggcaagttacttaacctctctctgcctcaattttctcatttttaaaatgggcaaactaatagtgactacctcattaggtttttagaggattaaatagattaatgcctttaaaattgagaacagtgagtggaatatagataaaaaaggaagacatttcataagtgcctggggttcccagcctctttggccaagtactgtttttccatccaactgtttggcccctgatttgcttttacctctcccttacttgttcatcagggatctggttttacttcaaattgtgcttattatcttttattttcctgtggttctcctctgctaatctaggtttttatagttctaatatccttttgtagtggaaaataatttgggagattgacaggaagacaataattgttgttaacagtgagattttatggcacatcgttggggtttatagtaataggtttttgtttcatatagcaatagggattgttcaaaagttaaaatttttttttgccatgcttatcattatgcatacttataagagattagaatatttcagaaatataaaactcagaaataaaagaagtattctctaagtatttagtgcttgctatgtgataagatactgttggaggtactgaaacataattgctattaatagtttggcattatttcttacagtttttttaaaaagatctgtatagtcataaaagttatgttatttatgaaaataagaatgataatgttttgttttgcaggaaaagtcaacactaataatatgctctagagaaactaacgcttacttagatgtttttaacattatagtaaactaatatgccgagcttcaaaatgacccaacatataacttgtagctgggatattttggtgcatttggcattatactgtaatttacagtatacaacatctgaggacttttagcagtatcttggcacaacagactgactcctcccatcccatcagaggtggagggaggaactcttttctccccataaattcttgatttttaattaattaattaactagtttttctagttttcatctcctctcttaatattggactttgatatttaccttttttattcatttaatttattttttaaaaatgttttggccagatgtggtggctcacgcctgtaatcccagcactttgggaggccaaggcaggtggatcacaaggtcaggagattgaggccatcctggctaacacggtgaaacgccgtctctactaaaaaatacaaaaaattagctgggcatggtggtgagtgcttgtagtcccagctactcgggaggctgaggcaggagaatggcatgaacccgggaggcagagcttgcagtgagccgagatggcaccattgcacacattggtctctgtgtcttttttcatgcaagtcccatgctgttttggttactgtagctctgtggtataatttgaagtcagtaatgtgattgctccagttttgtttttttttttttttgctcagaatggctttgactattctgagtctattgtgatttcatataaattttaacatgttttttctatttctgtgaagaatgtcattggtattttggtagggattacattgaatctgtagattgctttgggtagtctggacatttaaatgatattgattcttccaatccatgaacatgaaatatatttgtattttttggcatccttttcagttttttcattggcattttatagtttttattatagagatctttcacttctttggttaagttaatttgtatgtatttaattttatttgtagctattataaatgggattacttttttgatttcctttttaaattgttcactgttggcatatagaaatgctactgatttttgtatgtttattttgtatcctgaaactttattgaatttatcagttctagtggtttttttagtggagacttcagttttttccaagcataagatcgtatcatctgcaagcaagtttaatgtgacttcttccttttcagtatgaatgccctttatttttacttttttaaaaaatacttttattctaagttctgtggtacatgtgcagattgttacataggtaaatgtgtgtcatgggggtttgttgtacagattatttaatcatccaggtattaagtctagtaccctttaattacttttcctgatcctctgcctcctctcaccctcagccatccgatagaccctagtgtgtattgttcccctctgtgtgcccatgtgttctcaccattcagctcccacttacaagtgagaacatgcactattcagttttctgttcctgcgttagtttgctaaggatgatggtctccatctccatccatgtccctgcaaaggacatgatctcattttttttatggctacatattattccattgtgtgtatgtgccacattttctttatccagtctatcattgatgggcatttaggttgatttcatgtctttgctattgtgaatcgttttgcagtgaacatccgtgtgcatgtgtctttataatagaacaatttatatttctttgggtatacccagtaatgggattgctgggtcaaatggtatttctgtctttaggtctttgaggaatcgccacactgtcttccacaaaggcagaactaacttacactcccaccaacagtgtataagcatttctttttctccacaaccttgccagcatgtgttatttttgactttttaataatagccattctgactggtgtgaaatggtatctcattgtggttttgatttgcatttctctaatgatcagtgttgttgaggtttctttcattgattcttggccccatgtatgtctttttttgagagatgttcgttcatgtcctttgcccactttttaatggggttgtttttctcttgtaaatttatttaagttccttatagatgctggatattagacttttgtcagatgcataaattgcaaaaatgttctcccattctgtaaattgtctgtttactctgttgatagtgttttgttgttgttgtttttgctgtgccagaagctctttagtttaattagataccatttatcaatttttgcttctgttgcagttgcttttggcatcttcatcatgaaatatttgtgccgatgtctcgaatggtattgctgaggttgttttcaaggatttttatagttttgggttttacatttaagtcaataatctatcttgagttgatttttgtgcatggtgtaaggaaggggtccagttttaatcttctgcatatggctagccagttatcccagtgccatttattgaatagggaatcgtttccccattgcttgtttttgtcaggtttgttgcagatagttgtagatgtgtggtcttattcttgggttctctattctgttccattggtctatgtgtctgttcttatatcagtgccatgctgtcttggttaccatagccctgtagtatagtttgaagtaatgtagcatgatgtctccagctttgtttctttttgcttaggattgccttggctattcaagcttttctggggttccatatgaattttaaaatagtttttttgtagttctttgaagaatgtcaatggtagtttaatagaaatagcattgaatatgtaaattgcactgggcagtttggccattttcacaatattgcttcttcctgtatatgagcatggaatgtttttcatttgttttttcatctctgatttctttgagcagtggtttgtagttctccttgtagagatctttcatttccctagttagctgtattcctaggttgaatgtcctttatttctttctcttgtatgactgctttagctagaactttcagtactttgttggttaacagtggtgacagtgggcatccttgttttgttctagatcttagaggaaagactttcagtttttccccattcagtatgatactagctgtgggtctgtcatatttggcttttgttatattgaggtatatttcttctatccccattttttgagggtttttattatgaaggaatgatgaagtttattgagtgctttttcagcattaattgaaatgctcatatggtttttgtacttcattctgttgatatgatggatcacattgatttatttgcatatgtcaaaccattcttacatcccagggataaatcccatttggtcatgatgaatgattcttttaatgtattgttgaattcatgtttgcttgtattttgttgccaattttggatcagtgtacatcactgatattggcctacagtttcccttttttgatatgtcttttggtatcagggtaatactgaccttctagagtaagtctggaagtattccctcttcctctgtttttcagaatagtttgagtaggattggtattagttctttaaatatttgatagagttcaacagtgaagccatcaagtctcaagttattctttacttagaggctttattacgacttcgatcttgttacttattattgttctgttcagcttttggatttcctttttttttttttttttttttttttttttgagacggagtctcgctctgtcgcccaggctggagtgcagtggcgggatctcggctcactgcaagctccgcctcccgggttcacgccattctcctgcctcagcctcccaagtagctgggactacaggcgcccgccactacgcccggctaattttttgtatttttagtagagacggggtttcaccgttttagccgggatggtctcgatctcctgacctcgtgatccacccgcctcggcctcccaaagtgctgggattacaggcgtgagccaccgcgcccggcctggatttcttcatggttcaatgttggtaggttgtatatgtctaggaatttattaatttcttctagatttttccatttattggcatatggttgctcatagtagccacaaatgatcctttgaatttcttcagtatccattgtaatgtctcttttttatctccaattttatttattttggattgtgctgggtcacccctgaaacgagcatgtctcagagcccaaggtcaatggtgtactccatgggtatcagtggtggttgttcagggcccaagagttctttagttggcagatgataaatgcttccaggactgggttcttccctcaaggcagtgggatccttttcggcccagggtgtgtctagaaatgttatccaggagctggggcctggaattgaggcctcacgactctgcccattaccttattctactgtgagtgacctggtgtccaagatgcaagacagagtcctctttactctttgctgtcctctccttaagcagaaagaaggagacactttcatgctgggagcttcactgcctggagttgggggagtggtgacgcaagcactcccttaaccatgctagctggtgacttcgtcctttgttatatgtgagagtgactctttgttttctcaggatcccaaagtgctcattcaaagccatctctgtctgttttccaacactgtttatgtcaaattgtaggagaacacccgttggaactttctttacattctcttgctgccgtgttttaaagaatgaaggtacagcagtatgaattaatcatggtttctcagttgctgggcacctgccaccctatttcactagctctaagccaaggctagtgctaggagttgcctaggaattgcagtctttgcattctagatgcctttcaagtttacctaggatcccagagcatttcagcccgcagtgttgaggcttgctgagcaactcaagttccatctgctgcgatggatgtttccctgctggctagggctggtccaaatgctccctctgtgtgtgggagctagctgaacctaggatggctctatcctccgctgtgacagggcagcagtgaattcaatgtgaagtcccccagttgctgtgttccttatccccaaagtgtacaaattgcctttctgcaccacacggtggctgctgagggatgtgggtggggtggtatcagcaactcatgactgtctctccatccttcctcaatgcctcttttggtaatacaaagttaaaaccatgcgctgtgattgctcacctgatgtttggttcttatgacagtgtttttctttgtgcagatggttgttaaaatttggtgttccagggagtgtgggggtgtgattggtgtaggcttctattctgccatcttactctgccctctgaactttaatttataccataccagaaatcagagtgaaggtaaacaacaaggttacaatgtaactctattataaattttgatttttttttggtgacaaataccagtatatttttgtctttggatctataaattatttaatttagcaaactctaaagcttataaaatttaacttctcaagaagtctagcactttatggctattaattttactatcaaaatatccaggttactgaattcattttaataattataattcttctaaacatcatttgaagaattatttgtggacactagactcaagactacactaaatccaaacagtatacctaggacctgagttttgagtttttcatctcagttatctgtccttcaagttactacttcctcttatgctttcttttactaaccaaattttcagatttttacattggaccttctcctccaaggccctatgggacaactttgtaaatatgcatttacagcctttaaacaccaacattttaaactgagactaattcctgcaaccacatttcttgttaaaagttcagcactaggctgggcacggtggctcatgcctgtaatcccagcactttgggaggctgaggtggacagatcacttgaggtcaggagtttgagacccacctggccaaaatggtgaaacctcatctctactaaaaatataaaaaaaaaattagccgggtttggtggcgggcccctgtagtcccagctacttcggaggctgagacaggagaatcacttgaacccagaaggtgaaggttgcagtgagccgagatggtgccactgcactccagcctgggtgacagagccagactccgtctccaggaaaaaaaaaaaaaaaaaaaaaaaaaaaaagaagtttagcactaacagtatctttctgccattttcttctgctcaaggaactaaagaagtcaaacagataatggttctgcctgagccatttgtgaagtctaagaacagttacgtatactccctgttattctttcagggcattattttatccttttttttaaaccttgaaaaataggtgttacttagccttataaaattttgaagtaaagtttctgaatttctgtgaagaactcttcaagcaattcagcttttcaaacacagtcgtcacacaatagtccctgtaacatgggatttattccacagttaaaaagtgacttcctcctttgttatatgtgagagtggctgtttgttttctcaggatcccaaagtgctcattcaaagccatctctgtctgttttccaacactatttatgtcaaattgtaggggaacacccgttggaactttctttacattctcttgctgccgtgttttaaagaatgaaggtatagcagtatgaattaatcatggtttctcagttgctgggcattgtactgctccagggttatcaatagatacagtcagattcctgcgtttgtgatagatgtctggcattgactagttctctttgctactacatctagcagttgttccgtgttcaactgggcctgaaccttcttcaggcctcttccgaaaagaaaagttacctgtgaagtgtctttctgatggcttaatttatttcctctcctggtaaaactggacataatgttattttttctgtttagctggttaggtctcttgagaactgcaactggtttcctatgcacttcattttgtttcagaaggcttgcctttctttttaacactggaaaatagtgttctgtattcttgtcacttagacgtggacaatacatacataggactaattccttttccaattccagatgattttctaactgcaagtccagtgattatccataaggatgtctctttccaggcattactcttcctctgcagcttagactggttttaccaaaaccagaattctgttggagtacccattgtattctcatcctaaattgctggagtcttctgtttagttttggaaaattctgcttttttcctttctttcaattcagtttgatgacaccagccaaagacataccaattttgtcaaggtgtttgttgctgcgagctttcagcagctgtgacaaggtcactgtggcttctaccaactgggtaccaaactggttcatggctggaaatgtggtgctagaacagtcagtgcggaaggccagagttggaggcctgccatctctcatgcacacacgcaagcagactgccgggcagcatccttgtcctcccacccgtggttgccagcatagaccaatttatcccattcctttaaattacttgatagtgttctctggaatactcttgaatataccataatttagttagtaaaacatattgatggattgctgatagttcagtttcttactattacaagcagtgatacactaagaatcctgttacaaatatgtctttcgagtatgtgtttctggagaataaatttgatcaaatgatatattaacttagcatcttaataaattcaaaaagattgttcttatttaaacatcagccttcttacctgtttccttatgcttttaggaaaactaggtattatcaatttttatactctctgtcaatgtaattggtagatacgtttcattgttttaatttgcatttaaaagattcatgaaatggggttttctataacatttttattttagtcatgttttacatattgtgacctgtactgtgtcgatatccttagctcagttttctattggatttttctttattctattgattagtaagattgtggtatattagtgaaaatagccatttgtcaaatgttggaaatttttttgcttttaaaaaatatacatactctataccgtcatagattttttaaaattataggtagtcagatttttaaatctttttaatggtaacttgattttgttcttatgcttaggaattcctttccctacaagagtattatgaatttgaaagattttctgtcatcagtattattgtctaatttttattataatcaagatttataatatctaggaatgtttatttccttttctcttttttgttttcattgtgttcctagattttggtctctaatttggcatgtacaacataatcaaatagcctgaaaccttggcacattattagttactgtggatcagaatagagtattagatgggatgatcttggatcctgcttaattgaataccaatttataagtacctatacttggtaccaatttataagtgggccaactatcagtccttgtttgcgtgacatagtctaagtttaacctgtcttccagaataatttttttttttgagatgaggtctcactctgtcactcaggctggagtgcagtggcacaatcttggctcactgcaactgtggcctcccaggctcaagtgatcctcccatctcagcctcctgagtagctgggactataggagtacgccaccatgcccagctaattttttgtaattttgatagaaacagggttttaccatgttgcccaggctggtctcaaacccctgagctcaggccctccttggcctcccaaagtgctgggattacaggcctgagccactgcacttgaccaagaataatttttaatagtcctctttcactataaaaagtgcctcagtttaaataaaaaattataaatgttatagaagatagttgtttacatgggatagttcctcagggtattgtaacactaaagctttagttgtttctatttatatcattcagttgtttctatttacattacttctatagtagtaatatttcatttgctttaacttttaaaatatctgttattttcatgatgaacttattacaagcttcatacagttgcttatgtgaggtatttctagaacagtcatgctagtgtgtactctctttgccttcattttaattaacagaatgatgttcactttttgcattaaatgtcccttataattcttatttacctagtattgctttaaagatgatgaaacatttgtctctgtatgtggacatattttggttatattttactaaatgtgtcatcaaatcttttttgtatggctgtgacctaatgttttaacctggccaaataaaccattacttattacattaatgttttctgatgttgcatatacttggatcattggattttgtggtatgctaagtaatactactgttcttaacacagatccccgtgggagccactaaatgccaatccctcttatactgtcacagtgttgataaaactttggtacttgttatctgccagatagattttcagctatcttattttattccgatagtacttctccagccttttcttatgtagtactgtgtcaaagactattttataataggtacattgtgtctattgttctttctttcctttctctactacctctgctactgcttaaaaggtttatagagtttagtattggtcgttttcaccaccgattataaactgtaaatcaacccatattgtttcttaaactattattttacattttgaggtgtttgtaaaattgccatataaaaaggccagtttcaattttcctttagttaaaaataccttttttttttttttttttttttttacaaatacatcttaagaaacctaactttttttttttttttttacatttccggttgtttgtgtgtttatatcataatatgtatgtttctcagtgttatatttaggtatatatgtttggcccttaatttttatgtttgttggtcccattaataaaatttgagaatatctggtgagtagaacaccatatgggaatttccagttgtgctaccattagcctttaaacattagtctttggatacagctatttatttatattttcaatttcatgttatgtaaactgtatatgagattttcataaaagtttgttcttttaaaatatctaggcactgaagataaattaatgaaattcttactgttatttttgcaatgcatgtaataatatgaagagaagctggttttattagacatggagtcatgtttattgtatgatatataaagtatctactgtaatatataaaataatgtttgttggtttttgcgtttcttctgcagagagtgataatgaactctcaagtggaacaggtgatgtgtctaaggattgtcctgagaagatcctgtattcttggggagagttgctaggaaaatggtaaaattttatttttcatactgaaaattctatatttacatagttgatgttaatttgttgtattaaaatctgtgtgttaaaataggttttaaaggattaatattaaaatctatcttaatatcttaatattgtttaaaaacttaaaaattaaaatataatttatagatactctttatgtttggctaggtcttccccccaagtatggttttatttaacttgcttttagaagatgtctttgtcttattatttcactcagaccgtattatttgtcttattatttcacatcatttagcacagtcaattttatgctatattgccaatgcatttaaatgtctactgttaaagggttatgtttttttaaaaccaagtctattaccactaaaatgggctgtatagtttagaatttctcattttacgctgattgttaactgacacagcttgtttcattctttctgactaaaagtattactttaaattttggcgtattttatgtggaattacaaaaaaagtactctgtttatatttattatattaagtactttttatatttatgatacattttttaaaatggtaattatgactatcatatgttggtgtaatgaaaaaatcctgccaacaaaatacttccccatattagtatagacatagaaattcaatttattgttgaatatgcactcagattacatgcatgcgggtagtccaggggagactacaaagtctgggcggaatttcacagttcagtagaagaaagaataatttaaacctcttttatcctttcaagagaaaagtggatgctccttatgatagtctgtatgcatcttgagagtttccttagttgtaatttaggaaatatgtatttacagttccaacggttggaatactgatgatttttcattgtaaaatctggagattaggtttatcaaatttggaccaaagtattgggcctgttattgtttttaaggagataaaccctgaatggccagctgcttctcctttttaagcaaagaaaatttcattttatgtatccttacacatatcacataaaatgaacacatttcagagaacttatttaactcattaatgaatgtcaacataaaataatcaaaagggtcagaatctaatttaaaggtaatttattcaatagcaaaatatgagcatggaccacccagaaacaccacctctaaaggaatgcagtcagtggtccaaagtagggaagttaagatttcatttatataggcagaggcacaggagtttttagcaggattatgacattattcatacagggctggtgcatagttacagcagtttggttggttataggcagtgcttttttcggcggggggatgttaaaaattttttttaactttttttatagagggtacaataatcgtaggttttctgttatctggtctaagtgaagcagaatgacaaaagggatgttaacctataacaagggtcattaatgaagaaggcaggaggttttggtccttgacatcatttaattctctctagttatcgtacaaaacaagaaaaatgtgatttaatgtataatccaagaacagaagttgtaaccatatgtgactcagataacagtcacgtctctctcaagacttaaagtgttgttgtttttttttattccaacagcttttaggttttattttcacatggagcaccaataaggtattagagccaatcaaaataaggatttgatttagagatttattttctttacctggcaattcatttgcactaccatgaatgggagtcatttgcatagctatggacagtaaactttgcattgccattatgttatatatgttgagagttgtaaactagcctagtcaaagacaaaggcacacacttctatgttgtcacccaattcccagatgttccagccattctattgaaatgatgttcagttatcattttgtccatttcaaaaatcttacacaattttaccccacattatatccagaatctaacttactcatttgcaagcattgtccacctaaatgtacctcatatgtttttatctgttttatttagggttactctcttcctttaagatgaacagttctctttttagatggtcctgagttaggacagtttcaatgtgggatggagagcggcaggaagtgagatgggagagtgtgttctagttagaggcagatgactttttcagtctcagaccaggctgggaaacaggaagcatgctaaactttttaaacagaagcattttaatgcagataattggcttacaatgtgttagaaggttgagagagcagaaaggagatattatgattggagtaacccaagtagtaggaaacagctatggcctatgggactggagaaataaaatgaaagaagtattgttaccagagtctaggaactcagaggaggtctgaggagctgatgcagggatctctgaagagggctgcatcctggttgcttagaattatgaggatcctcatagcagctagtgtttagaaagaactgtcagggcaggggacaactgtttagttccacacttctgaagagatacccagatcttggagcaggtggggaggaccacatcattggtgctggtacttgttagcctggctagtattagtatttttcaggagttaacgatatagctggtgctggcaatggaattccttcttccattcttctgccttccaactgtacatcactattactcatgggcagaacctaacctgaaagccagtgggcaagggagtttgggatatgtagtctgcagattctcagcccttacatctttgagcagaatacagaagggtggacttgtagctgataggcagtgggtaaatgactacaaaagggtaaaagctgggcctaattctcatttacccatttatctggtccaattgaattaggctttcctgatacccaatgtttttagatagagatttatttattaggagcactgataagaaaaaaaacagcaccaacaacttgtcctaatcttcttcatctttggtctgaaagtgtacttttatggtccaaccatgtggatgtgattgatagtattggatgtaatggtagcgtatgcattgataccacagcttggctgctactgttacgtggtttcttcctttcccacttcaagttatttgctgggggaaggcttaggaatttacatggacctccatgcatcatagaaataagcaacgtgtctcctgcggcagctctactctctggacagagtttatttgtccctgattctctggtgaagaacaggggcatagtcttccgttgtggccacttcataaaacaaggactcccttcttactggctctcacattactgagaattgggtgcttactttttacgggcccaacacattctttctagtatagcaaaatacacaacacctaaaactaataccttatactccaattgaaattaatcagcaaaacagctcctagatatcaatatataggtattgtagaaactaattttctttggataaggtgtttcttcttgtccgtaatttactcccaaaggcaaaataatttcaacttgataagatctatcggaggggaatataatttaatgggaaaaatacattacgcttaaactcagaactgaattagacttccagttgtagtgctaacttgataggtagcttgcacaagttatttaacatttttaggttccatttttccagtgaagcttttataaacctgctcatgtatgcatgctttgtctttcagaagtggaataatgtttgcaaagtttttttgtgtgttttgtttttctttttcctagcccttagattgagaaaataccttaatttttattgtctttttatggtttgggattatatcaccattcttgaggaatttacaataacagtctgggctgtttcatttaagagaatatgtacaaacatctcactttcttgattcttagatgaaatttagttaaaagtcgacatgcttattgggagatatggcaaggtgagaatgtttgggaaaggaagtagagacagacattggatttttgtcagtcaagtttcttttgattttaaattatttattcattacattttctacatggcagttaatattctaaaactataaacaaaatttaatatagaaaaaatattatgcttttcttttttgcctttgcatgctcttatttcaaaatagatttaaaattcatggcatattatactagaaaacaagtctgtcaatgatctaagcttctatctttagatactaggaaaaaagagaaaaacccaaagcaagcagaagcaaggaaataagaacagaaataaatggaattgagaagaacacttcagaaaatcagtcaaactgaagctgatttttataaagattaatatgtttgataaagataaccatctaactagactgaccaagaaaaacaagggagagagagaacacagatacaagaatcaaagaggctacatcattacaaatcactacagacattacaaggatataaaataatattataagcaactcactgtctataaatttagaagcttaggtgaaatcgacaaacacttgaaagtcataaattgccaaagcttacttgaaataaataacctgaatactcctgtattagttgacaaaattgaattcatagtttaaaagttttcaatagagaaaatttgaggccaaaatggcaaattctaccaaatatttaagaaaaaaataataagactgggcacagtggctcatgcctgtaatcccagcacttcaggaggctgaggcgagccgatcacttgaggtaatgagtttgagaccagcctagccaacataatgaaaccctatctctactaaaaatatcaaaaaaattagccaggcatggtggtgtgcacctgtaatctcagctacccgggaggctgaggcacaagaattgcctgagcctaggaggcagaggttgcagtgagctcagattgtaccactgcactccagccagtgacagagcaagactctgtcagaaaataaagtagagtaaagtaaagtaaagaaaaggaaagaaggaaggagagaaagacagagagagatagagaaagagagaaggaaggagagagagaaagaaaaagaaagaaggaaagaaagtgaaggaaagaaaggaagaaagaaagagaaggaaggaaggaaaggaaagaaggaaggaaggaagggaaagaaggaaggaaggaaaaaatatataaattctacataaactttccagaatatataagtgaaggcaatactttccagctaatttatgtcatttgcttaccatgatatcaaaaccggatgaaaatattacagaaaagaaaattgcagacgagtgtccctcatggatatagactaaaaaagcctcaacaagtcctagcatatcaaatccaacaatatataaatttgaaaggataatgttgcatgactacgtgggacgtattttgggaatgcaaggctgctttgacatttgaaaataaatcagtgttattcacttatatcaataggctaaagaagaaaaaccatataatcatttcaatagatgcagaaaaagcatttgacccaattcagcattcattcttgatttaaaaaaaccaaaaaacaaaaaaacctctgagcaagctaggaatacaagggacctttcttaacctgataaaaggtacctatgaaaaacctgcagctaacatctaacttaagaatgacagatcccaaaactgggaataaggtagggatatctactctcatgactcttactcaacttagtactagaggtcttagcaagtgtaacaggcaagaaaaagaaataaaaggcaaacaagattggaaagaaaaatataacactgtctctatttgcagagatgtgattgtctgtgtagaaaaccccaaggaatctacaaaacaaacaaacaaaactcctagatctaataaatgagttttacaatgttaaaagatacaagatcaatatgtgcacatcagtttcatttctatacactggcagtgaaaaattggaaatagaaattttgaaacaaaaaagcaccataaaggaaaaccatgaaatatatagaaatcgaacaaattgtgagctaaatatatactttgacatactagaaaacagtaatcaaagacatcaaagaagacagaaataaatgaagatatatgctatgttcatggaatgaaaaaatctcaatattattaagatttcagtcattcccaaactaatcttaaaattagtgcatttccaataaaaatctcagcagattttttggtagcaaccaacaagctgattttaaaatttatataggaagcagagtaactagaatagccaaaacaattttgaaagtgaagaacacaatggaaaggcatattacctgatttctaggtttactgtagcactacagtagtcaaaagagtattgatacaaggatagacactgagattagtggcatagaaaagagagttcagaaatagagccacgcaatctaaacagacattttctaaagaagacatacaaatggccaagtagcacataaaaagatgctcaatatcattaaccatcagggaaatgccaatcaaagctacagtgagataccacttcatacccactacgatgtcaatcattacaaagacagataataacaagtgttggcaagaatgtggagacattgaaagcgtagcatagcaactgcaactcttttttttttttttaagattttattattattattttttattatactttaagttttagggtacatgtgcacattgtgcaggttagttacatatgtatacatgtgccatgctggtgcgctgcacccactaactcatcatctagcattaggtatatctcccaatgctatccctcccccctccccccaccccacaacagtccccagagtgtgatattccccttcctgtgtccatgtgatctcattgttcaattctcacctatgagtgagaatatgcggtgtttggttttttgttcttgcgatagtttactgagaatgatgatttccaatttcatccatgtccctacaaaggacatgaactcatcattttttacggctgcatagtattccatggtgtatatgtgccacattttcttaatccagtctatcattgttggacatttgggttggttccaagtctttgctattgtgaataatgccgcaataaacatacgtgtgtatgtgtctttatagcagcatgatttatagtcctttgggtatataccgagtaatgggatggctgggtcaaatggtatttctagttctagatccctgaggaatcgccacactgacttccacaatggttgaactagtttacagtcccaccaacagtgtaaaagtgttcctatttctccacatcctctccagcacctgttgtttcctgactttttaatgattgccattctgactggtgtgagatggtatctcattgtggttttgatttgcatttctctgatggccagtgatgatgagcattttttcatgtgttttttggctgcataaatgtcttctcttgagaagtgtctgttcatgtccttcgcccactttttgatgggattgtttgtttttttcttgtaaatttgtttgagttcattgtagattctggatatcagtcctttgtcagatgagtaggttgcgaaaattttctcccattttgtaggttgcctgttcactctgatggtagtttcttttgctgtgcagaagctctttagtttaattagatcccatttgtcaattttggcttttgttgccattgcttttggtgttttggacatgaagtccttgcccatgcctatgtcctgaatggtaatgcctaggttttcttctagggtttttatggttttaggtctaacgtttaaatctttaatccatcttgaattgatttttgtataaggtgtaaggaagggatccagtttcagctttctacatatggctagcgagttttcccagcaccatttattaaatagggaaccctttccccattgcttgtttttctcaggtttgtcaaagatcagatagttgtagatatgcggcgttatttctgagggctctgttctgttccattgatctatatctctgttttggtaccagtaccatgctgttttgggtactgtagccttgtagtatagtttgaagtcaggtagtgtgatgcctccagctttgttcttttggcttaggattgacttggcgatgcgggctgttttttggttccatatgaactttaaagtagttttttccaattctgtgaagaaagtcattggtagcttgatggggatggcattgaatctgtaaattaccttgggcagtatggccattttcacgatattgattcttcctacccatgagcatggcatgttcttccatttgtatgtatcctcttttatttccttgagcagtggtttgtagttctccttgaagaggtccttcacatcccttgtaagttggattcctaggtattttattctctttgaagcaattgtgaatgggagttcactcatgatttggctctctgtttgtctgttattggtgtataagaatgcttgtgatttttgtacattgattttgtatcctgagactttgctgaagttgcttatcagcttaaggagattttgggctgagacaatggggttttctagatatacaatcatgtcgtctgcaaacagggacaatttgacttcctcttttcctaattgaataccctttatttccttctcctgcctaattgccctggccagaacttccaacactaagttgaataggagtggtgagagagggcatccctgtcttgtgccagttttcaaagggaatgcttccagtttttgcccattcagtatgatattggctgtgggtttgtcatagatagctcttattattttgaaatacgtcccatcaatacctaatttattgagagtttttagcatgaagggttgttgaattttgtcaaaggctttttctgcatctattgagataatcatgtggtttttgtctttggctctgtttatatgctggattacatttattgatttgcgtatattgaaccagccttgcatcccagggttgaagcccacttgatcatggtggataagctttttgatgtgctgctggattcgttttgccagtattttattgaggatttttgcatcaatgttcatcaagtatattggtctaaaattctcttttttggttgtgtctctgcctggctttggtatcagaatgatgctggccttataaaatgagttagggaggattccctctttttctattgattggaatagtttcagaaggaatggtaccggttcctccttgtacctctggtagaattcggctgtgaatccatctggtcctggactctttttggttggtaaactattgattattgccacaatttcagctcctgttattggtctattcagagattcaacttcttcctggtttagtcttgggagagtgtatgtgtcaaggaatatatccatttcttctagattttctagtttatttgcgtagaggtgtttgtagtattctctgatggtagtttgtatttctgtgggatctgtgatgatatcccctttatcattttttattgtgtctatttgattcttctctctttttttctttattagtcttgctagcggtctatcaattttgttgatcctttcaaaaaaccagctcctggattcattgattttttgaagggttttttgtgtctctatttccttcagttctgctctgattttagttatttcttgccttctgctagcttttgaatgtgtttgctcttgcttttctagttcttttaattgtgatgttagggtgtcaattttggatctctcctgctttctcttgtgggcatttagtgctataaatttccctctacacactgctttgaatgcgtcccagagattctggtatgtggtgtctttgttctcgttggtttcaaagaacatctttatttctgccttcatttcgttatgtacccagtagtcattcaggagcaggttgttcagtttccatgtagttgagtggctttgagtgagattcttaatcctgagttctagtttgattgcactgtggtctgagagatagtttgttataatttctgttcttttacatttgctgaggagagctttacttccaactctgtggtcaattttggaataggtgtggtgtggtgctgaaaaaaatgtatattctgttgatttggggtggagagttctgtagatgtctattaggtccacttggtgcagagctgagttcaattcctgggtatccttgttgactttctgtctctttgatctgtctaatgttgacagtggggtgttaaagtctcccattattaatgtgtgggagtctaagtctctttgtaggtcactcaggacttgctttatgaatctgggtgctcctgtattgggtgcatatatatttaggatagttagctcttcttgttgaattgatccctttaccattatgtaatggccttctttgtctcttttgatctttgttggtgtaaagtctgttttatcagagactaggattgcaacccctgcctttttttgttttccatttgcttggtagatcttcctccatccttttattttgagcctatgtatgtctctgcacgtgagatgggtttcctgaatacagcacactgatgggtcttgactctttatccaatttgccagtctgtgtcttttaattggagcatttagtccatttacatttaaagttaatattgttatgtgtgaatttgatcctgtcattatgatgttagctggtgattttgctcattagttgatgcagtttcttcctagtctcgatggtctttacattttggcatgattttgcagcggctggtaccggttgttcctttccatgtttagcgcttccttcaggagctcttttagggcaggcctggtggtgacaaaatctgtcagcatttgcttgtctgtaaagtattttatttctccttcacttatgaagcttagtttggctggatatgaaattctgggttgaaaattcttttctttaagaatgttgaatattggcccccactctcttctggcttgtagggtttctgccgagagatccgctgttagtctgatgggcttccctttgagggtaacccgacctttctctctggctgcccttaacattttttccttcatttcaactttggtgaatctgacaattatgtgtcttggagttgctcttctcgaggagtatctttgtggcgttctctgtatttcctgaatctgaacgttggcctgccttgctagattggggaagttctcctggataatatcctgcagagtgttttccaacttggttccattgtccccatcactttcaggtacaccaatcagacgtagatttggtcttttcacatagtcccatatttcttggaggctttgctcatttctttttattcttttttctctaaacttcccttctcgcttcatttcattcatttcatcttccattgctgataccctttcttccagttgatcgcatcggctcctgaggcttctgcattcttcacgtagttctcgagccttggttttcagctccatcagctcctttaagcacttctctgtattggttattctagttatacattcttctaaatttttttcaaagttttcaacttctttgcctttggtttgaatgtcctcccgtagctcagagtaatttgatcgtctgaagccttcttctctcagcttgtcaaagtcattctccatccagctttgttccgttgctggtgaggaactgcgttcctttggaggaggagagacactctgcgttttagagtttccagtttttctgttctgttttttccccatctttgtggttttatgtacttttggtctttgatgatggtgatgtacagatgggttttcggtgtggatgtcctttctgtttgttagttttccttctaacagacaggaccctcagctgcaggtctgttggaataccctgcgatgtgaggtgtcagtgtgcccctgctggggggtgcctcccagttaggctgctcgggggtcaggggtcagggacccacttgaggaggcagtctgcccgttctcagatctccagctgcgtgctgggagaaccactgctctcttcaaagctgtcagacagggacatttaagtctgcagaggttactgctgtctttttgtttgtctgtgccctgccctcagaggtggagcctacagaggcaggcaggcctccttgagctgtggtgggctccacccagttcgagcttcctggctgctttgtttacctaagcaagcctgggcaatggcgggcgcccctcccccagcctcactgccgccttgcagtttgatctcagactgctgtgctagcaatcagcgagattccgttggcgtaggaccctctgagccaggtgtgggatataatctcgtggtgcgccgttttttaagccggtctggaaagggcaatattcgggtgggagtgacccgattttccaggtgcgtccgtcaccgctttctttgactgggaaagggaactccctgaccccttgcgcttcccaagtgaggcaatgcctcgccctgcttcggctcgcgcacggtgcgcgcacccactggcctgcacccactgtctggcactccctagtgagatgaacccggtacctcagatggaaatgcagaaatcacccgtcttctgcgtcgctcatgctgggagctgtagaccggagctgttcctattcggccatcttggctcctcctcgcaactgcaactctcatatgttgctggtggaaatacaaaatggtgtagccattttggaaaatagcatggtattttataaaattgaagacccttcttataccaccccagcaattccagtcccactgctgtgtgtttaccaaagtgaaattaaaacctgtatgtgaatgtttatgatagccttgctcataatcaccccaaactgcaaacaacccaaatgtccgtcaaaagtaaatggatcaaccaactgtggtatattcattgtatggaatgctactgagcaattaaaagaatgaactgatatacattacaactgatggatctcaagtgcatcatgttaagtgacctatgccaaagtcaagtgacttaatactatgttattccatttgtatgaaattctggaaaagtcaaaactatcatcataggaagcatgtcagtagttgttaaggactggtggtattgactacaagagggtccagggaatttgggtatggggggaatgagggaactatcctgtatcttggttatggtagtgctcacaaacctatgtgcatttgtcaaatctcacagaattgtatactaaaaatgtgaattttactctgtataaattgtgccttaaataaatgacaaaaaagaaaaaaaagccctgagttttaactgcagtaggtgctgaagcaagaatagtgtcactaaaccaaaaaaaaggaaaaaaaggaaaaaaaaaaagaaatttatgtcttatacatagatggctatttgaagtgtgttcttttctcttgtcagaacagtgccttcattataccttgcatatccatttttctctctttattttgtaatatttattataggtaactctgtcttaactaacttctctcttcttatcctgcaaagttatgtcaagtgcacatgacctccttaaagtcactgttgttttagagacatctcctgcagtttctagagtatagtaggtgctcaattcatatttattgactgaattttttgatgaaatatctcttaccactacagatttctgtccaattttatgaacattttatatatctatatttggtaattaattatcttgtcttatatagtgttttaagaaatctaagttgtaatattctctattaggttatacatagatttatttatcttatatctggcttcatcttgaaccctgggaatgttacttgactaatttgtgtcttgatcatgtcatggtgagatattttgatttagccattttaaaaacatcattctgactgcccagtgaaaaatggattataagggaacaaaggtggaagcaggcagattaggagaatgctattgtaaataatccaggggagagataattacatgttgcactaggctggtagcagagggtgacatgtgatcggattctggatatattttaagagagtactgactgtatttgcttctcttttctgtgtggcctgagaaaaataaataactggccactgatgtcagagtttttggcttgagctactagaagacttgctgtttactcaaatatagaagagagatttggaggataaaatcaagattttggagatgttgagatgcatttaagacatccaagtgactatgtccattaatcaatttcatgtaacattgagttcaaggaaaagatagggaaggaaatatgagtttgggagtcatcagtatatagatggtttttaaagctgttagaatgaaatgggcgagattacttacggagtgagtttagatgaagacatcatccgaagacatcatccaaagactgcaccctcgaccactccagtgtttgggagttggacgtatgaggaggatcaggcaaaggagcccaagaaagtacaaccagtgaggtgggaggagaatcaagatagaaatccagtaaactaagtctatcaagaatgacacagtagtcaagtgctgataggtgaagtctgatgaagcctagaattccactggattcaacaatttaggtgtcactggtgatcttaagaacagtttcaatggagaggcaggaatgaaagcccagctggattggaaatcagcagatatagatagctcttaaaaatagttttgctataaaaggatgataggaaacgaggacacattagtaagtggatgtgggttgagagttttttattaaaatgggcaatatagcatgtttgtatgttgttagaaaggatgtaacagaaaatttgatagtgtcagagaaagaggacataattgtaggataatttgatgaataggcaagaaaagatgtatatgttgactagtggaggggttgaatttgggagcagagatagctcattgtaacggaaggaaaggtgaggcatggctacagaggtaataactgacagttcagtgtacttactatgtgccaggttctgttctaagcactctccatgtgttaatttaattgttgcagcagctctctgaggtaggtattattatatcttcattttagaggtgagagaactgaggcatagctatattaggtagctagtgtaaaaatacagaaaacaaaatggcagcaactaagtaacttgctcaagatctcacagccaataagtaatttgcccatgatcatatcaagtaaatgacagagccagtttctgaatctaaaccactctggttttagagccagaacagggtgtgtgtgtgtgtgtgtttgtgtgtgtttgtgttttcttttttttttttgagatggagtttcactcttgttgcccaggctggagtgcaatggggcgatctcggctcactgcaacctccacctcctgggttcaagtgattctcctgcctcagcctcctgggtagctgggattacaggtatgggccaccacgcctggctaattttttgtatctttagtagagacggagtttcaccatgttggccgggctggtcttgaactcctgacctcatgatctgcctgccttggcctcccaaagtgctgggattacaggtgtgagccaccgcaccggcctagattagtttttataagagcatgtagaagttctagtgagtaagtgaataaactaggaaaatcgataaccctggcccaggcagtacttgaagcttctagtcatgattttaaagagagattatgagaatggcagtatggtgggtaagaaaacaaaatattttgatgactaaataaacagtcaaatagagatctccactcagtttctaaaatgcaagatttattacttgcttcaatataaatttatgaggcatcatcttagactcttagagttacatagaaaacaacatagtttctacctttgaggtttataatcaatgtaggtgggaatgcatactcataagagattatttaacaaagtaactgaaacactgaggctgtttcacatttcttgaccactttttttcctgtaaaacaagtcacttcattcattcattcattcaacttttaagtcttaatcatctattctttcttggggactttaacagacactgctgatttaaagatgagtaaggatagtttctaccctcaaggtttaccatgttatagaggcatgcagacctttaaacagaaaattgtgatattatcaataaatccttctgtaagcattgtagacctaatggaaatttttgaatgtacacagaaataaaataatacaatgaagtctcatgtgcccactgcccaacttcaataaagacaatatctaacaaatttctttaagctgagactcccattgggtttttcttttttttttttggaaggtaatattggagtaggaagaacattgattaacagagaaacaaattgggaagtaattgcatgggttgatgatatttataccagactcactgaccctatgtacagagatgaggctccaaatgggaaaagacttctgaggtagaaatgacagggttgctcagctgaaattcagtgtacatttttttcagaaataaaatatttctaataatatttttattaatggactttaggaaattatttaaagatctgagggaactgttttaaaaaactaacataattgattcttagacctttagaaaacttgttggattttttacaattcaaattttttttatttgggccattattataattatgtcatgatatgaaaagggtaacatttgtgtaaactacagaagtataaactactatgtcttttatacgaggattgtcaaatatttttaattgtgctcaaatttctttttgaaacattcgatttagaaatttcctaagtgtcgggaaaaataggtaggcatttacatatagacatttttgtgatttatgtaggtaaagcacctgtcatgtggagtcctacactttgtgctttggggaaatattttttaaagtgaggatacagtatatatgctcagtgaaattttaaacgtgtttgaaaagattttgaacttactcttaaatagctagatcattcttttaaaaaagcaaaacatgaataaagtcagaattcttataattaaatacactatcagaaagatgtaaaggaaaaatatttcaatactaatttgaaatcattagaaaaaataaaaataatatagaaaactaagaacagactgtataaaaagttcagtactggaggtctttataacagattggagatacaggtgtattgaaataactacatgaaaaaagcacataagctaaagaaagaaaggttgagagagagagagagaaaacatttgggataggagaacttgtaaaaacaaaactaaacgtggtagcaagatttcttttatatgttgaatatattcagaatggtaatgctgatgatttaactattatttaaataatttaaaggattaggcagaataatatctggataactgcttcaggttttgagatgcatggaaaacttaaaaaagtttaaagacaaaaataaaggtagtgcttactgtgaatacttagtaagtcaacttttagcaggaagaatatgcaggaagattttctaaccaaaaagactaagtgaacattggaggaaaataattgggtattggattattacatcaagtaaagtcaccttcaaatcggtcattcttttttattgagtaagagaaaattggtacatagccacctacttccacctcctatcaaaatttctgtaattccattggtgacttttcagtggtcacattcaatgacttttatccccctcatctcttgctttttctgctgtttttattgaataagagaaaattgatacatatttagtaggcattttaattgtattttcatggctattcattacttatcagcagagtgggaaaatgtattctgaattaatatgcttttcatcttcataatgacctttaatctatcctttttcttgaaacatttcttaatgtaggtcgtataacttctccgtatctagttcttctcattattgcgggatggagaaatctccgacctttcttgatgccacctcatcttttaatttcagttatagtcttttcctttctagagagaactttttcaaataggtcatgctgctggtgtcatattctcatatctcatagccacctacttccacctcctatcaaaatttctctaattccattggtgacttttcagtggtcacattcaatgacttttatccccctcatctcttgctttttctgctgtttttgttagaaataactctttccctttgaaattttatctcccaatagacatctttaaaagtagagttcttatatgcctaagtagtttcaagaaaatcctctttgaaagcaaaggaaatccactagatgagtccatgacatttttttgatcctattaaattcagtgagaatgtttgcttctaaaaaagcattcttttttgtttagctttagtaattgacatattaatttcatttcataattatattcattcacttaccaaaaatgtattaaatgccttttatatgtggggcactgtttctaggtgcttaagatatataagtaaagaagacaaagattcttgccattgtggagtttctattcatgcattaaaacctagccaattactgtatgattaatagatatttgatttatgtatgactttaaaaataattgtattaggtatccgtcttgtttctagggtagagttcagcatgtatcataactagttgcctattttcaagttcctgataactgcagttaatgtatcaaagcaatggcaatgtgtaattacattttaatcagaaatattgaaagcaatgattatttttataaatttctcttttatttatttggatcttctctgatcatagatatatactagcagcatctagcttaatatttattagtacttctcaagtgatagggtgctgtatgcagtataattgctgtactgttacttgggataaccagtaaaataaggctgttaatcaagcagtgttatgagtgacccagttctttttaaatgcctgtctctaaagataaatagtgctttgatttttaagagaggagaaaagacattttcattatgcctggccaaacaagtggctgagggtcagctagaaactgaatgtcaattgagttagattatattatggtaaagtattcattggggactgttgactattaatcttaaggagtatgtttatgtacgtgtgtatgcatgtgtaggaagagatattcaaactttaaaatatagttaaatcattatgttattatatatcattatataaaatattacagttaaatcattatgcaaaataatctgggccaaccgagtatttaatcaagctgcttgttactttcattctgcctacaatgttggaaatatgttatagtaggtccagtgaatgttaggaggctattgcagaagtctggggaggataaagttggttgcagttgagatggaagtgcatgaactttgtagaggttgagaaaataagatgtattagacttggtggtggattagtaatagatgatggggcaaaaataattcctaggtttccagtttggatggagtgtggtaacaatttctgaggtggaataccctggaaaacgaccaggttagggagaagaaactgagttcagacttgggcatactgactttgaggtgcctttgagcttctagaacttgggatacatgtttataggtgataatgcctagagacaagagaatgaaagaaaagggcaagagtaaagagagataacttcaagcccttaagaggttaatagaggagaagcaatcaacaatggagtttgtgaaggtggataaagaagtagtgctttgtcactgaagccaagggaaacagattggtccacagtgaaaggagtgaaaatatgtcttgaatccagtggggcatggagagaagtcatagatcatttaagtgaaaacttttcaaggagagatgcagaagccatgttgaactgaattgaggtaggagttggaggggaagaaatagagatagtgcttccataccaactcttgaaatttgttgcacagggtaagagtgtgatggagaattgcgcatggcattgaagaaaggatttttttcaatgttcttaatttttaaattttgagacagagtttcactctgatgccctgcctggtgtgaccttagctcatttggtctcaacctctgaggctcaggtgattctcccacctcagcctcccaagtagctggaactacaggcacatgccaccatggccggctaagttttttgtattttgttttttttctagagatgaggttttgccatgttgcccagtctggaactggtctggaactggtctgaacgcctgggctcaaacgatccgcctgctttggcctcccaaagtgctgggattatggatatgagccactgtgcccagccaagaaaggattctttcacatgcagttttaattaatttaatttattggagttttaatagctgtagagacacagtgatgacttgctgatctctatataacatgtaacatatactatatttaactactttggatttcccttacatgatattataaattattggactcataatttagaatattttgcatttaatttgagaggaaatgacctttgctctttgtacatcattgcttttaattaacccagttttctatactaatacccttaacccatatgtttttcctattcaacagtataatcacagccaaacattaaattacaaaaagatccttttatgactaatcctggctctcttgtggcataatattccttgtcaaatagtttattcaggtggaagtcttctgaagaataattaatactcttcctctacttgacatattttgtgaagcataattatctatgatgtttttccaaattaactaaaattatgttttaatttaaagccacgagagaagtttaaagaattgaaatgacttcttgtgttttatgattataaaagaatttaaaatcattataaatatttcagacagcataggaaaataaaagggctactttcccttttaattctattacacagatattttggagtatgttcttccatattatttttctatgcatgtctaaaagcaggtttcaaaatagcggttatggaggtgtatttaaactaacacctatttactaatttgaaacttgcttttgtcacttggcagcataactgttattttaaggtatggtagcacgttaagtcatataaactctgcctttctctagtttatttttgcttcaagcccatcagtattatcagcttagtttctctaacccaacaatacaaaagcttagctagaaaaggctaaaagaaaccattaaatctgatggtttactaaaattattaatgggatgagtttacttgaacttgtttcagttgtggaagttttagtttttttctgagatagcccaaatatgacagtatggggaaagcaaggaatatattttcagaggaaggtatgccaatactggggtttgagctagaggtagaagagtgtgtataatctagtgaagcaggtgggaggccacttttagaaaatagacatgtggattctatgactttcgaggctcaaaacttgaaaccagagcctggggtgttagatcaaaccagagtacattgtcaaggtttggagtcccagtggttgcaccagagtcagctctaatagataaaaaatgagcaacaaatacaagtaaagtctgagcaaaaaggcatagaatatagttccagattcaagctaggcaccaggaaaaagatgacaaatgaaattgcattcacaatattgagatatgcaattcagtttcttggtcagatgggcatagtagcatatttactatgttgtgatcattgattttaggaggagagatctttgcctttgttctgacgctgcacacctttgggatgtggtaaagcctgataagtatgtgttgcttccccagcaagttggagttgttgtgtaggttctggtgattgtaggaaagggttaggtccttcctttaatgagcacttgctgttgtaacaagtcagggagacaaattcagacatgtaaacaataatgaactcttcttactagaaaacctatcttaggttgttttaacttggaggttcattgatatctaagtttatgcttgaacaaagaattccaagttaggtcatcaagagatagggcttcctggaggacctgggagtcaggatgtggccgccaggtaaaacttgactataatatgtatgccttatgcctcctatactgtggagtctgtctttggcacttggcccagctcagcttggcctcagagaagtgggtatagtcaaggtgtgataggcctatgatccgttttcaacatcatttcctgaaccctatttcctaccacacatcattgtccagcttgctgtacattcatttcagggaatccagatggttctttttatgccttgaaatgttgcctagcaatatataactaacacgttaattattatgagtaagtccataggatgatttttaaaagtaagtgagaagaagaacaagcttttcctggaggtagaattacctggttcaccaataagaagatgagatcaataaaaaaattgaagatataactgagcttaagcagtactattgtttaatgcccccccacaaactgttttctcttgacccaagcttacacttttatataaactagtatacttttcatggcaacagcagttcaggagttgtaaaggaagtgtgaatggattattttcttgtcttctcaggcacagtaaccttggtgcacgaccgaaagggctgtctactctggtgaagagtggtgtccctgaagcattgagggcagaggtatggcagttattggcaggctgccatgacaaccaggcaatgctggatagataccgaattcttatcacaaaggtaggaagaagttcttttcatattattttcattggatgacctattaaataaatcctagttttcatagctcccataagtcataaatgctttgaacttcttcatgaatatattgaggtcgtgaagtcagtacttctaccttttgttctgaacacttgtagtggtaaacaatgcacttagtcatctatgaacattgtatgccttggtttttatcttttcattcaagtgattttataatagctatttaccaaattggaatatatttatatttcaagtgttttctaacttttcaattaaccttttttaattgtatgagatttatatagttataatcatacatagttactcttgtataattttacaataacattaaaatgaaattaaaaattcttctgtgcttatgtcaccttacatttaaataatgtagatacttgccctttttctgtcaggggcccttggttccactgtaaattcctttgcttatgtctaaatacctggttttagagcataagtaaaggtaggtgttggccttgaccctggactcaccaccctaggtcttaccacctaattacttaatctactctaagtactgtattttaaaataatagtaaaattttattttttaatttaaaggaacctctcctcataaatgagatttttataatcaagactttgttcctcagactatatgaacttttagaactttttatctgctgtaatttctttttacttttctttcctctttgcctccttcccttccataaatattttctgagtgcctagtataattatcactgctgaattcagttttttttttttaatttaactttttttttttaaattgatggcctctgcattggaatatgcaagatgatccattggtgtgtgggaaaaaatgtccaaagttccatttgtatttcttttaaataagtacaccaaaggatactaagctgtactaatatttggtgtgccatagtactgaggctttatgaggtccttgggtccagtggccactggtcccacatggttcaggagtgaccttagggaagaatggaacttacacactttggaggaataattgtggggctcacactcgtatattaacttccaaaatattataggtttcttgcagtttgcatgtgttagattaagtggatttacaggttatctagatgtaacttaatcctcataaaatgtgtgattggcttaaaaagattactatcacaggatgctgcatgtcaagttttttttttaatttaatatgttccttcagggaagaattaatattatgataatgacaaagcaactacttttggaaacaaactcatgtaacaaagatggacattttgaaacatatggcggtttaaacacctctgtgatttttttcattgaaataacatgcatcactataaaaaactcttacatcttcacacttaaaaacctggaatcagaaactttaaatatgtttaaaacttatacaagtagttgcagagaatttggaactgattgttaaaagcatataaacacaacaccttctgatttgttcatatgaatatctagaagctggtgtggtggcatatgcctggagtctcagctattgagaggctgaagtgggaggactgcctgaggccaggaacttgcacctgtgactagccactacactttggcttgggcaacatagcaagaccctgtctctaaaaaaaaaaaaaaaaagaaagaatacctagagaaagtagatatttcctagccaaatttcaacaaaatgattgatgagtgggactgaaaaaatgatgtacgtctacttgggtctgtggatctttgtaagtcttttttagatatgataacaaaaccatgaatcaaaaaactgatgcagaaacaagttttcattgttgttttataaactgctataacaaacatattaaaaatagtgacccatattttatgattatttttatataaaatgtttagaataggcaaacctatagagacagaaagtagactaatagttgccaggggttggaggaaaaaggaattgggggtcactgctaacagatatatggagtttgtttttagatgatggaaatattctggaattagacggtggtgacagttgctcaagattatgaatatactaaaaaccactgaattgtacacttctaaatggtgaattttatgttatgtttaacacaatagaaaaatttcacacacacaaaaaaagatccatattcaatattgaatagtattttatagcatttttaattatcttttttacatcctatctaaatttctgtgctttataatatctataatatattagtataatagcacttgtacatgataaatatatatatgttagatatttatgcctagaagtttttatcgatggagtatctgattgaaattttcagagatcataactctgggtatcaaattactttttcttgtaaataataaactaaattatatacttttattggctgccatggggtaggaggtaactgccataccccttttttcactaagaggctttcataattcatacctttaaaaattttaagggaaaaatgtaaagaataccatcccctgatattatttatgaattcttgataaacagtgtatgttcatatagtgagaaaatttttatcatttataccaaacaccatggtagttttaactatacaacttgcaaaaaatactttaagatcaagagatagggctgggctcagtggttcatgcctgtaattccaacagtttggaaggtggaggtgggaggatggcttgagcccacgatttcaagaccagcctaggctacatagtgagacgctgtctctacaaaaaaaaaaaaaaaaattagctgggcatggttgcacatacctgtagtcccagctgtttgagaggctgagatgggaggattgcttgagcccaggagatcgaggctgcagtgggctgtgattgtgccatcaaacttcagttcagctggggtgacagagtgagacccagtctcaaaccacaaaaaacagaatggcaaaaatcattttcattgaataaaatatatggaagatacttggaggctgataaattacattttttagatttcttccctctggagttctagctgtgatttactttctgccagtgaagattgcggggaggcaaaagccatattttctctggcagtgtggttggcagatacctgggcttcaccagttgtgaggtttttgcatctgcctctgggcatttcattctcaatcacttgccttcactctggggttactgtttcctgtggtttcctatcctgagtggccacagcagccttctgattctctggactgtagctgtggtgacacacctaaagagctggaagggcaaaagactgctacagcaggatgttcagtcttcagtcttttgccctttcagctctttcagtgtttaaggaccttcattcctgcattacatcttttttgaaatagtttacctgattaaaccctgtctgatacacttggcatgtatttttctccttgttttcacaagatggcttttctacacccagcattacatttagaaaagaagaaaagaaaaacaaagtctactcaaggtagccagacttgaggctaagagcccagtcctccagactgccagctttgttcaagacttctgacatcagccacaatttgggggttcttagtgccaccctgacttcagaccaactagcttcaaacttgtagatcctcacagacttcctcaggtttgataatttgcgagaataactcacagaactcagtaaagtgctatacttaaacaattgtagtttagtgtttttgtttgtttgtttttttagtagcaaaaagatacaaatctgaaccagccaaaggaagacatgtatagggcagaatgtgggactaggagaattccaaatttgaagcttccatcattctcacggatatgttaccctcctggtattatcctcaagggctcattacctgcctagcatcaatatgtagcaatatacacttggaatattgccaatcaggaagctcacctagttttggtgtccagagtttttattggagttttattacataggcatgattgattggatcattacctatctggtagaactcaatctctacgctccccttctttcctccccagaggaaaagaaggtagggacacagccaaaccatattgtattggggctgttgcgtggctcaaaaccccagtgctgtaatcacatggtcggtctttgtggcttggccagcctacgtcatgagtcttcttcttagtgtaaactatctgggggcttaccatgaatcatctgattaacataaactatcagatgtggttagaggggcccaccacaaataacaatcctgttattcaggaaatttcaagggttaaaaggttactgtccatgggctggaaaaaaggctagacctctctttggcatttctgaacccagtctatcacccttttaaagactttttcttaagcaccaaacaacaactccatctatatattcttgaccagaattctggctactatcttcatggaaaactagaaatgttttttaaaagatagacacattgatttatccctccacccccgaaaatctaggctttttgtaaacaggaaagagaaaataggtattgagtagaaaactacctttctgttccccaactgcctcttaatagtgacactagttgagatctattatggaatgaattattctaaaaatatatgtaaacttaatttattttagaactgtaaatatttactaattgccacttgagattgattagcaatgtgtaattcagttagtataataaatattttcacattcagcttataaatctatgacaactttaagtttttaatgttatttctattgttaatacagttatcaaaaacattttcatacaaacaatatagaaatgtgtggctctaatcatgtgcgtttattcagggtctcaaatcataagacttctttgacataaagtacagtggtatatttaatttcattgtcttccttgcattatagtaaaatgaataatgtcattttttctaaaaatgattttttcctttcactgtccttggggtagcaatgagatgacaagtgcctgtagccaagagtgtatgtgggtactttggtggtgaatacatctgagcttatagtcactaagtggaaagggcatgaacactcaagagtattttctgtaagaagtgcctgcatatttggcacttgttggtcatggttcagcagctgttcgtcctttcttttggtccagttaatttttcctgtcttattaagggaatggcaagatttcaaggttagttaatgaaatggttcagcttgaacaaacaattgctttataaaaaattgctttataaaaaccctaccagaggcctcagattacacagggaagaaggaatatgaagtattttatatttgtctgttctcacactgctataaggacctacctgagactgggcaatttataaaggaaagaggtttaattgactcacagtttcacagggctgggaggcctcagcaaatttacaatcgtggcggaaagggaagctaacacatccttcttctcatggtggcagaaaggagaagaatgagcaggggaaatgccagatgcttataaaaccatcagatctcgtgggaactcattatcacgagaacactgtggggtaaaccgcccccatgattcggttatctccacctggtccctcccacgacacatgaggattatgggaactacaattcaaatgagatttgggtagggacacagccaaaccatatcatatttcagaaaatttacttaaggtttggcttccatgaaaaagtagtctaccatttaaatctatagtaggaatgtactggtttagaatttgaacccacaaatcacattctgaagcattctttcaggggtggcaaatatacagccagcaggctaggtggagcctacaaatatgctttgtatggctatcaatacatcaaagaatggtatacacttagggattaaatttatactttcttttgccatgggcgtattactctattacttactctctatcttttataccttttaatgcctgtttggtcctcaaatatattcgattttgtgactccattataatactatgtcagcagccattgcttgcttcagaggagggggctatcacagtgtgcttgcaattgattaatgtctgcttccccagcagactttaaaatccacaggagcaaagaccacaactgtattgctccttatgaaatagcctatgcctggcatagggcctgcctgacacattctagatgataaataaaattttttccctcctaagaggagcataaggtcatagttgacttatttgtatagttatttattctgtttttcttttccatcaactatagccttatattgtgttaggtcctggataaagcttttaagtatgaagcaatgtcttttttgtaggaaacctattcatcttgttggggagagctataagcaatggattaatttgagcagctgttcctggtgaactaacctcttctctttttgccagggaggaggtggcagccattaagaattagtaccctagagaattttgcaatggtagtgggtcatgtagattgagtcaccttgaatcatggtaggtcaatgattggcctgccatggtaggatagacagtaatattgaacatagaatagggccgggattacaatgtggaacaattatactttatatggtcttgttggttttataatctatagaaaataaagttcttcatatcattttgactggtagtaaatgactctagggaccaaagtttaaaaaagggtgaaaatctctggatgagattcaagtgaaaatgaagcaggttaggagctgtagaccaactgataacctcaatctggaaccaaggaccaagcaggaccagtcagaagagctgttatatgtaaatccgtgttgaatcactctccacttcagaaggagctttcaggcacaccttgccttggtaacagtggtagcttcgctttaggaggagattttagtgctcactatgcaggaagaccctgggttcgaatctcaaattctgctacttactggttggtgaccttgggcaagctccttaactatcttcagtctcacttccttttttggtaaaataggcataataatatgtatcttacaggattgttgtgagaatttagtaagataatttatataaagcactcaatgcatgcctaatacatgataagcactcacccgtgatggggaatgaggaaaattataaagcaatatatgcataaatgaagtttgaagtaagctttcggaattaacatcatcagaaagtactataggaaatatggagattactgtgggctcttgaggtccgtgcaggtttcaagacattcatctgagaaatggggagaaagaaaacaggaagtgtgtagcaccctgttatctacttgtaccgctaattcattcattatttatcaaacagtatctcttctgtatcagaggctatgctaagcactagacatgtaaagaagactaatacctataccctatccttgaggagtttacagcccagtgggggaagatagtcaaaaaggcaaagaagcagcgataacatggttaagcactgtgacacaggtatgagcaaagtgacaagtgaggacaaagactggatacagccatttctgcctaggaacagagaatgggagtatgtgtttaggctgaggcaatgccatacataaacacacagagttgtgaaaggtcctgccatggtcaggggctgtaagaagttcagtatgacccatgggagtactctagactctacagtctaagtgagcaaagatggtatctgggttttgctcactgctctaaccttagtactcaatgctaggactgcccctcagtagatgctaaacgcttcctgaaggatttaatggggtatgtgggagacattatgtctagtgctttcatatatcctttccatgtaagcctcacagcttctgtaatatgattcccatttttaccatcaagaaaactgtcacatggttactaaatagtagaatccgtgaactcaaaaacccaaaactagaatgaaagggacaactcatccctacttttggtcttgtaaagatcctttagaaaaactctatatttttctgatcatcagttattaagagtaataaagaaaaggttgaagaaataaaagcactatctcatttctatatactgttcattgtatggaaatgaaaatttataattcagaaactattctatcaggaaacacatataaaccttagaagtcagtgagtaagaaagaagttctaaagcgcctaacttcaagtcatctcttttaagatgagtcttgagccttcaaccattgtctgttgttacatgattcctgccactgagttgtagggtactactgctgctgatgaatcactggaagacttttaccacatatttctgaaatcctatgtcctttattgtttatcattgagatgtttttattattcctgttaagctgcatttttcataacgtttgaggtgatctgaaacgacaatagaaggatcatgaccttgttcctgtgtagaaacaagcaaacagtatttagagcttctgaaatgagtacttcttaattgttggcttgaggacccactaagcaatgatcacattttcacatattcttagccatttgaaatggagattgtgtatgttttagggcaagtcaaattttatgtagcatgacagaactgtgtgtgtactttcagtaattgtatgacatatatggtatagtttgcctatcatatctgctggtttatataacataggaaatattagattgtagttgtgtggtcttttgtaaaaatgatcttgtatgtaacgtgtgtactgtatactttgttaaaatcaaaagatgcttttaattgataagcttttagaaataataatgccatgaggtgtttctctctaccacttgaattcctgtttttctcccaaatgaatcttttctttcgaaagtgtatgtggttatatatgagagtgtgtgtgtgtgtgtgtgtgtgtgtgtgtgtgtgtgtgtatatatatgtgtataccatttcttttcttctctcttttttttttttaagagacagggtctcaccatgttgctcaaactggagtggtggctcttcacaggtgtgatcatagtgcactgcagttcattcttttaaaaggatttaagtgctagtgtttgatagacctggatttaagattcacctctcccatgtattaatttgtgatcttggaacattgtcccaacattctaagcctcagtttcatcatttttaaagcaggcttaatagtagtatctaccgggatttttgtgtaaattacataaaatgatgaagtgcttggcgtatagtaagtactcatgattagcttctgctatctttatcaatatgatattacatcatgaacaacagtaatagcaatgttaatattaataatggatattggtgtcagggcatgtttctaatttaatacatgtgttaggtaacttccagttacaaagtttttataagagcacatgatgtgtataatagctgattatactgaaatacgaagtgtcagatttgtatttttctggtttgggatttttttttttttggttggtgaatatcatggagtatttgcattctaaaatttgactttgtattggttatatgaattattttagtgattatgcaaattcaactatatagtaaagtcaaattatattctctaaaaatcactcctaaatactgtgttatataatcaagactagaaggcaggtattactctcattcacttattaattcacttattcaccaactcttgattgatcaacttttatgggctaggctctctattgtttctagggctatgtagatcaaaagacttcacacccttgaggagtccagcctagggaaagccaggcttatgcactgatagataactttattatgatacaagttataataactgtcttaatcaaatgtgtagaatacagaagagatcgtgacagctctgcttgagtgagccagggaagacttcacagaggagagaatatctgaggtgggacttgaagaatatttctgagcaggataggagagggcatgtagtatagggagtggcttatgtagtttttcagcttccatttaatgagttagcttgggttatccagaaagcctttgagagttaaatcagtatgttccttccttcccctactctcatcctagttggccagcttcatctatttatgcatcaatgcgttaaatagaaacttaatgtaagtttattcttgttagaacaaatacatatcatggtaagcctcgggaaatatatgtcatgtcaaaatgatagcacaaaagaatatttaattggtcatctagggttgatgtaataaggttttaacctattaaagcatctattcagttcatctttaagtacctattgtgtgtcaggtactgtgctaggataataatacatattaattttttaaattaattaactgaaaaaatatcgattgactaaagtaaaacaatataaacttgcaaagaggcagcactgttttataaactccagagagcatttgtttaaacctgtatcagacagcaaaaagggcaatagttgcaaatattaatttggtagttgctggcaaaaattctttttgaaataataaaaaacaactgcaagagtggcccattttaagattctgaaaattctctgctttcttgagcattatatggacagaaaaattttccctgcatttattcacatcagattactggtactgctcagagtaaagcctgtcttctttctgttctccagtgtataattgtagcagatggcttttaataaaacatttagctaaagaagaatttttactctgggttggtggaatgtattataatgataatattggaaattctcaagaggagatgtttaatttggtatttttcttttgattgaataatgtttggtgaataattgaaaagtcaaattatagtatctgctacatcgttttttatttgttaagtttcaaaactaaattaaatcatgtagatgagtcatgtagccaagtaaatatttgctttttctttacatggtttactttttaaacattaaggcagtttatcctagtaaaataacactcaatactagattttattgagagtcagagcatcgcttaattatatggctgctctgttctctgtcatcaccttgtctaggtgtaggctttgagctttttgatagaatgaggttattccagctgtgtctgtaccattggtatttataaaaaccacaggctgttgtataaaaaccacattactgatataaatacaaaatttacaaagatctcatcagaaaatgtatagttactaaaaatttactaaccacaacaatgaggcaggcaaggagaataaagagtactcattgtgttgtaatgtaaatgccttgaatatgtaggtactggaaagtctttattaaaatgaactaagaattggctgggtgcggtggctcacacctataatcccagcagtttgggaggctgaggtgggctgattgcttgagcctaggagttcgagaccagcctgggccacatggtgaaaccctgtctctacaaaaaatacaaaaattaactgggtgtggcgacacatgcttgtagtcccagctacttgggaggctggggtgggaggatcacttgagcccgggaggcagaggttgcagtgagccaagatcacgccactgcactccagcctgggtgacagagtgagaccctgtatcaaaaaaataaaagaaaaaaagaaaaaagaaagagaaactaagaattaatgaaagaggttctttaagaaaatatacaatttattttctcttttcttgcataattatatatttgcttatggttaatttttttacagaataatttaaatcaaattttcttgatccccatcctttgagatctttcatttactgtctgtctatagtgatatctacatatataaaaactgtaattatatgtgaatttgagaagtaacagttttcttctcaactctccaacactgtgtataaaatttaaaatatactctaagtattttcatgtacttaagtgatatattctattattagtaacaaatatagtttttgttatccttcaaatgtgtttaatagttttgaggtaaattaaggaagatataactttttaatattaccttcattttcatattatggaattagagtaggagtatactgttttgaagaaagatgttagaggttattgttgagcatagatcatttcatggcttacatggtttactttttaaaaacttaaggcagtgttagtcaaataacaatactagatttcactgagagtcagaggattgcttaattatacgactgccttgttctttgtcatcaccttgtgtagttttgtaggctttaatcagtaataaaatcagtacttgcctgggcatggtggctcatgctttaatctcaatactttggaaagccaaggcaggaagatctcgagtccaggagttaaagacgctgtctctacaaaaaatacaaaaattagctgggtgtggtgccacatgcctatggttacagccactcgggaggctgaagtgggaggatcacttgagcctaggaggctgcagtgagctgtgattgtgccatttgccattttaatgacaaaacccacaattacttttgcatcaacctagtctcatattttcaagagcctgggattacactcctgtattccaatttcataataactttattgacattagcacatatttctagaacatatttaatttatgtttcattgggtaatatggtgtggtgagttctctctagggattttgctttgtctttgatttacttttccatttaaatttatgaaatttatgtttagatgtgtttactattgattacggctgaggtgaaaaaagggataggcagctgatacccatgaggcacctacctcctgccccaacatgttatacatttctgcacatgttttggtcacagttccattttgcagcctcttatttgattgcttcatgaatctgtttctcagtatcttctttcatttttgtgtctctttatgtttttttttttgtctctccattatatctttaattttcttttttacctgcctccctttcttaattgtccaaaatctagagttgactcttaaagaatgcaggggttagtggctggcttccatctcaaggcagttgaaaaattgtgtataaccttttactccccccagatctaactattaatagcctattgttgagtggaagccttaccaataacataggcagtcagttaacatgtatcttgtattatgcaaaaagtccaaggattttgcatgtgctgatgtagctgcattgacagcttcatgaatttcctctttaattattattattatcattattttttactgttgtccttttgctggattcatttatctcaaagtagtggacatccgcagctgcagacttcagtgtgtggtacttattcagaattcagctttttcttgtaatgtgacttttctgtgcttcttgaaagcacttttagcttcactagtggcacttcatatgggtcacatggtgttactcaagttttatggtattgcactaaacaatgagaaatatgtgagaaccatgatcactttttacaatgataaaatgtactggagagatgaactgctcacatggagatgattagcattacacggcatttcaagcagatacactcaccacaatagcaacccgagatggggttgaaaattttacagttgcatagtatgtactacatttaactttatatagttttgatgtaatactgcatctttatgtttgttttgtgtttttcaaattttattttagattcagggggtacatatgcaggtttgttacctgaatgtattgcatgatgctgaagttttgggtgtgaatgatcctatcacttgggtaatgagcatagtaccccagtacttagtttttcagcccttgtctccttcagccttctgttagcctccattgtctgttgttgccatctttatgtccatgactacccaatgtttatctcccactcataagtgagaacatgtggtacttggttttctgtttttttgttaatttggttaggataatggcctccagctgcatccacattgctgcataggacatgatttcattcttttctgtggctgcatagtattgtatggtgtatatataccacattttctttttccaacccactgttgatgggcacttgtgttgactccatgtctttgttattgtgaatagtgctgcagtgaacatgcaaacgtgtgtcttttcgatagaaatatttgttttcttttggatatatacccaatagtaggattgctgggttgaactgggtagaatggtagttatttgagaaatctctaaagcattccacagtggctgtaataatttacattcccaccaacagtgtctacgtgttaattcccctttctctgtagccttgtgagcatctgttgtttttttttgactttttagtaatagccattttggctagtatgacatggtttctcattgtgattttgatttgcctttctcagattagtgatgttgagcattttttcatgtttgttggctgcttgtttgtcttcttttgagaagtgtctattcatatcttttgcctgctttttaatggtgttatttgttttgtgcttgttgaattttttaagttccttatagattctaatgttagacctttgtcagatacgtagtttctgagtatgttctcctattctgtaggttttctgtttactctattgatagtttcttttcctgtgcagaagctcttcagtttaattaggtcctacttgttaatttatgttttcttgcaattgtttttgagggtttagtcataaattattgttacaggaagtcagggaccccgaacggagggaccagctggagctgcggcagaagaacataaattgtggagatttcattttaatatggacatatgtcagttcccaaaattaatacttttataatttcttatgcctgtctttactgcaatctctgaacataaattgtgaagatttcatggacatttatcagtccccaaataatactcttataatttcttacacctgtcttactttaatctcttaatcctgttatcttcgtaagctgaggatgtacatcacttcgggagcactataattgtatgtaactgtacaaattgattgtaaaacgtgtgtttgaacaatatgaaatcagtgcaccttgaaaaagaacagaataacacgattttcaggaaacaagggaagacaaccataatgtctgactgcctgcggggtcgggcagaatagagccatatttttcttcttgcagagagcctataaatggatgtgcaagtagggaagatatcgctgaattcttttcctagcaaggaatattaataattaagaccctgggaaaggaatgcattcctggggaggggtctataaacggccactctggaagtatctgtcttatgcagttgagataaggactgaaattcaccctggtctcctgccgtaccctcaggcttactaggattgggaaaccccaccctggtaaatttgaggtcagactggttctctgctctcgaaccctgttttctgttgtttaagatgtttatcaagacaatacgtgcacagctgaacatagacccttatcaggagtttttgattttgccctttgccttgtgatctttgctttgccctttgccctgtgatctttattggcctcagaagcatgtgatctttgttatcctttttgccctttgaagcatgtgatctttgtgacctactccctgtttgtacaccccctccccttttgaagtccttaataaaaacctactggttttgtggcccaggtgggcatcacggtcctacagatatgctgtgtcacccctggaggcccagtaaaattcctctctttgtactctttctctttatttctcagactggccgacacttagggaaaataggacttacgttgaaatattgggggtgggttcccccgataaattatttcccaaggctgatgtccagaatggtgttccctaggttttcttctagatttttagagtttgaggtcttacatttaaaaattttaattcatctggagttaatttttgtgtatggtgacagataagggtccagtttctttcttctgcatatggctagccaactatcccgtaatagcagggataatgtgtggctaagtcttttcaccatttattgaataaggagccctttccctattgcttatttttgttgactttgttgaggatcagatggctgtaggtgtgtggctttatttctgcgttctttattttgttggtttatgtatctgtttttgtaccaattatcatgctgttttggttactgtagccttatatatagtatgaattcaggtaatgtgatgcctccagctttgttctttttgcttagaatgctttggctatttgggccattttttggttccatatgaattttagaatagtttttttctagttctgtgaaaactaatgttggtagttgaatagaaatagcattcaatctcttgctttctttgggcagtatggccactttaatgaaattgattcttccaatccatgatcgtggaattttttaaaaattgtttctgtcatttcagatttatttgagcaatgttttgtagttctccttgtagaaatcttttacctccttggttagatgtattcctaggtatatttttttgtgtatgtggctaattgtgggattgtgttcttgatttggctctcagcttgaacgatattgctatatagaaatgctactgatttttgtgtgctgattttttatcttaaaacttttctgaagtcatttatcagttccaggaaccttctggcagagtctttagggttttctagtataggatcacatcatcagtgaagagagatcatttgacttcttcttttccaatttggatgcctttctttctcttgcctgattgctctgggtaggacttccattactatgttgaataggagtgatgagagtgggcatccttgtcttgttcattctcaaggggaatgctttcagtttttacctgttcagtatgatgtttgctgtgggtttgtcatgaatggttcctgttattttgaggtatgttgctttgattcctggtttcttgagtatttttatcatgaagggatgttggattttatcaaaagcttttttcacatttattgagatgatcacatggcttttgtttttgtttttgattctgtttatgtgttcaatcaaatttattaaatttttgatacactgttgagtttggtttgttagtattttgttggggatttttccatctatgttcactagggatattgggctaagttttctgtttctgttgtgtctttgccaggttttggtatcagattgatgctgactctgattttatttacttcaaagtaatttttgatttctgccttaatttcattgtttacccaaaagtcattcaggagcaggtcatttaatttctatgtaactgtgtggttttgagagagctttttgatactgatttctatttgtattccactgtggtccaagagtatggtttgtgtgactttttaaaaaatttattgagacttgcattgtggctgagcatgtgattgatcttggagtatgttctgggtgcagatgagaaagatatatattctgtggttgatgggtagagtatcccgtagatgtttattaagtccaactggacaagtgtcaagtttaagttcaggatttctttgttagttttctgctttgatgatgtgtctaatgctgtcagtggggtgttgaagttccccactattactgtgtggctaagtcttttcataggtatagacatacttgtttataccccaaacttgggcgtgtatatatttaagatagttaagtcttcttgttgaattgaactctttatcattatgtaatacctttatttgttcacttttacttttgttggcttaaagtgtgttttatctaatataagaacagccacccttgcccatttatgttttccatttgcatggtagatcttcctccatccctttatattgaggctttgggtgttattatgtgtgagatgggtctcttgaagacagcagatgtatgaatctttttatccaacttgtgattctgtgccttttaagtggggtgttttgaccatttacattcaacattaatattgataatgtgagattttgatgctatcataaagttgttagttggttgctttgtagtttctattgtgttgtttcctgatagggtctgtgggctatgtacttaagtgtgtttttgggtagaggaggtatctttccttcatttccatgtatagaaatatcttaaggatcccttgtaaaactggtttagtggtaatgaattcccttagcacttgctcgtctgaaaaaggttttatttctcttttgcttatgaagcttagtttggcagaatatgaaattcttagttggaattttttttctttaagaatgcttaaaaaaggcccccagtctctcctggcttgtaatgtttctgatgaaaagtccactgttagcctgatggggttccctttgtacatgatctgacctttttctctagctgtctttaaaatttttttctttagcattgagcttggacagtcttgtgactatatatcctggtgatgttcattttgtgtagtatctcacagatattctctattcttgtatctggatgtctacctctctagcaagattagggaagttttcttgaattattcactcaaatatgtttttcagattgtttactttttctcctttctcaggaatgccagtaattcatagatttggtcattttacataatcctatttttatcaaagactttgttcatttttaaaaattcttttttctttatttttgttgactgtattagttcaaaacactggtcttcaggctctgagattctttcctcaacatggtctcttctgttgctaacacattcaattgtattttgaaattccttaagtgaattttttaatgactgaagctgtcattgatttatttttaaagatatttctctcttatttcctggcttgctttagacgtttgtgtcgattttcaaccttgtcttgaatctcattgagcttccttgcaatccatgctttgaattctttctgtcatttatgagtttccattttagttggggaccattgcttgacagctctaaggccatcccttggtagtgtcactacattgagatttttcatggtgccagaattcttgtactggttccttctcatctgaagacactggtacttctaatttttgtcattattttctcgcaggtatgattgtttttctttcttcatttccctatagtgttattttattttttctgtaccctcctccccccctttctctatgggtgagactgcagagaattctggttagggtcttttggctttgcttctatagccctatgcacttctttgggcaagttttatattgggctgtgcaatttaatgtacaagccagtagatgacgctaggcagccaatgcagttgggtatatacttgattcttgtttattttcggaagctctctgttgtgtcaggcagtgtactgattctttgaatgcacagtggtcgagctccctgcttaactaccataggacagaggccatgaaggcagggatagaccagcacatctgcccacacgtcccctgatggcaggcacttaaatttctctcaactgtgaatggcaccatgtatggtctgtaagtgtttgtatatgtaagtttttataaattataatttttaatgacagatttgtatatattttatggcagtaaattataacagactagtagctacatatatttcgtgcattcatgatataattttttcttaatttttttgatatttctaggccacatggttggcatgtttttcatgttatcacagatcttcaaaaaattttccaatacagtttttaaaaaaaatccacatataattggacccatttatttcaaactcatgttgttcaagggtcagctgtagttctgaaaagtgatattcattatgtgttgttttttatttgctgttttactttccctttcagtttctcagattagtctgcttttcggttgtatgacttttagttgatttttaaattgacaggatagtaggctgtcctactatctaggatactgtcctactatataggatcctactatactaatgagagaaactgtgttctttcattgtactttatatgcccagggcctggtactagcccttaataaataagcattgaatgactctatgaattaaacttagtgctccatgatttttttttaaaggagaagtgaattgtctgtggcactgtaattggagaatttgatttaaagttacaaattttggtagaaaactttaagttatataccatagctgattaattgaagtcttactttttttcaccacatttaatgagtagatcctggggaccagatacaaactagtttttttcactataattactacttatgaaatagaagtgtagttgctaatatgcacacctcaaaatatgacctatcatacatctattgaaaactagtttcctagtttttactgcctttttctatcaaatagaaaaaaaaatggaaaaaccatttaatggaaagccattgagtgaatttaagattattgttggccttggaaaaattcagttcctctgtgaaatttcttgagcttcttcaaaaatattctatgtaaataccatattggggatattattgatactgtaaaatctttttagactttaaagctttattccataaactggcttgtgatttaattaatatattgttcttttaacattattcgttagattgtttcaaagtatttcaattaattcaatatgttgcaatgttaaaataataactataccattttattaggattctttattcagttcctttttccctgtattaaatctttacattttctagattaacaatttattttatcagtaatacttccattaagcacataatagacttcaattttctacatacaaacatttttattcctaataagtgatgaacaggctcagtaaaagttgctaagaatgtttgtattgctggattggaatatcatggatatgcatactttttttttccataggagagagctttaattgttactaaagtcaggaaaattcagtcacttttgcactttgagaagctgatctctgacatgtttatgaaaactgcttaatcttttaataggtgacaaattttttgaagacagcatcatgacgcttctaccttgatacctgcaaaaatgatgtgaaaaggagcaattttcattttgctctttatatcttcagttctggtgtgaagtagaatggcaattttggattgaaagcttatcttaatttttctacccatctgtctagttggcatttagatattctaagtaaggctccatttcttcatagagattctttaatcgatgttactgtagctttctttctttactttccagggacctcagatcttattttcaaagctcaagtatttgcaggggtgattctggtatgttcacataatttttgactcattcagtcttataaatttgacctgggattcaaaatgcttattgatctttattttatactatttaaaatcaagactttctgcataaactataccagaaccttaaattaagtacttaaggaatttccctagaaaatttacatatatatatatatatacacacacattttttttttcctgtttggcctgatgatatgtctcttgctgtgagctgcagtttttccaactcacttctgctgtgacagaccatatcccatttggacaaaaaatagattgagcttaatactaggaaaaagattatgcttaactattactatgaagagaataattgttcatcccagtggcagactgtagtcttgcattaagtgttctgggactaattaatcaggaaacaactattattaaaaaggaaactgctcatcagctgcctgcttgggctattccacagaaagaaactgtagacctggctacttggactccatcttgtagcatcattctttaactgcttatgtcccagttaaaagaggtaatttaaggatttttagcagaccttatttggtagtgataaactttaatattaaattaatattaatggacttgttgagtataaattaacataaaaacaataatattgggttagaatattttggtcaatctggaaggcttcttaacttctaatcttaccacattttaaatcctggaacaagccatgctgcttacatataatcctagtagacagcatttgagtgtgtatgtaaatatatataaacaaacgtgtttgtcatgcaagatgaaaatttaaaaatctaaccattactgaattaagtatatcatattgacatttctgttgacttactagtttatttggcttaactaaagtcttagagaattactatataagagagtattttaacttaacaagagtatgtgcattacgtatgtgttatatgtgttgtttcccaggctgctttgtgtttgtaagatgattattatatctaggatttgaggtgtttcttaatttaccaaacgggaattgattataaactaatgagaattttataattgttcttgatgttgtttttgttaattttacctcttctttttttgatgtttgtcctaatacgtatacaccatcacaagtttattagtttctaaaataagcaagtagttggatgaattaggaaggtttttggcattactttcaatggcaaaaaccgcaattacttttgcaccagcctagtaagaactggaaagctactctcagtgaagactggaattttaacttattcttcttatatccttcccacccttctgtccccaaccaccatttattaatggacacataatacgtatactctgagcatatttttatgaagccaatttgaattgtggcccattggggattaatttattctgtgctattgtagtatttcaaatcagttatagttcaaggtgctaaatcttatacaaatgatgctgcattacagtctaatgtttacaaacttcatggcacgcttagccagggaaaacaatcttgcgaatgttgggggtaattgccttttaataggtagatgcagttctactggcttgtttgtttaaacaaaggaagaaacttattaaatgcccaacttatatgtgatgcatctaatggaaacaagacagtatcttgaacaagaacagtgataaagcctagagccatgggttttattcaagttttgtatctctgggcttatatttttaatagtttgttttaaactttgggtatatggatttgtattaattgctataacttactcaaatattcaccttactggaagtattgttgtgtgtgtatttaacacagtcgttttaagaatcacatattaatttacttttgtgactcattagtggactatattgatttcaaataataatattacagttaacatagaagtctaaaagctgagttacccagcccaagtcaaatagaaaatgtgttttagaactggaaatagaaacgggagttactaataatgtgtctgtgatttctaactctctttttgatgttttccactgaacattacttggagcataatatcatagagaatttttttatattgtgataaaattgcttatcaaagtttccattaataaatagtacttccacagactaaacactaagaggcaacttattggctctccagaggtgaaatttcaaatgctgaggcatggctgcacatatgcagaacttgttttgcttgttggttgtgttgcttaccggtgcttagtgcctgtcttccttggtgtatgtgaggcaatggatgaaagctgtacatcactccaaaatgatgctgaactgattctagtttgacacttgaattaccttctttcctaagataacacgtcttgttcagtttcaatgaggtagtagatattatttccacagatattgtttatggaactcaatgtagaatgattttttaccatataagaggaaaaattatcttgttgctaaattctatccagtttggaccagtacaatggtgtcttaagtcactggataattattgaatgtaaggtccctgtgatggcacattaatgctttgagagaatggttataattaaatcatgatgatgtctttttatcctggatagagatagtctataagaatgcctgtagcagtggagtgtccttgaaatatgagggaaacacatgtcttaccttagtaatcttaatggttctttaaggattctatgatgcttcaggggcactatgatgcttcaggggcactccaagcaatttttaatgagtccttagtctcatgaaaatatggcaggaaaattatacaccaacatttcatcattttaatcctgtgtagtgtctaaattttagaatacagtctgggtgcggtggctcatgcctataatcccagcactttgggaggctgaggcaggtggattacttgaggtcaggagttcaagaccagcctgggcaacatgatgaaaccctgtctctacgaaaatgcaaaaattagccaggtgtggtagtgtgcacctgtaatcccagctgctcaggaggctgaggcaggagaatcgcttgaacctaggaggtggaggttgcagtgagctgagattgtgccacttcactccagcctgggcaacagagtgagactccatctctaaataaataaattaattaagaatacaatataaggtaccaattccatacctctcttcattcaagtcttgatttaatggttagagtacttagtttttgataatctattcttggtttatttacattcagttttaattttactgctgcctgttatttgtcagaaacattacctaggacagatctcaaagtttaatgtgcattcaaaccacctgcggatcttgttaaaatgcaaattcagtagatctgggatagagcttgggattctcatttcgaacaagctatcaggcaatgtcaacactactactagttagggatctcactttgaaccaagggtctagatcatagactgtaaactctagaatgtttctgaaatattttttggattattattagctcagtgaattcatgagattatttctggctcactttagttttaagaaaataaatatgctaaaaatgtacactatatcttactattttctttaaaacagtttttaaaattttctgtaactgtggtttgctttcattgtaatagagagttcatagcttaatttgttattgtaaaaagatggacacatagtataatttaaaacttaaaatagttacagttcactatcaaaagaatattatgtaaataaatataaaatgaactatgaaagtgagctaaagttacttgccttataaggtttaagttattttttcttaatttatgctttatgtaacaactaaatcatctgacatttgtcttttatttgatgtgaaagtaggaagaaaagtcagagaatcaaagaagcagaagatgattcttttgaatgtttttttctcttgggttttggctgtccgctttcatttttgattccggctgcttctttaacttttttcacatgtatagaggcatttaaattttccatttgagcccaagaaacaagaattagattttacttccatgaatcttcattcttatactattaatattcaacacagttaaaaccataatacattttacttcccaggaagaaaagttttgtttcccattccttctctcgggttatatactgagagaagagggctttaatgaaaaagccaaccacattaatttaaaatgttctatcatggagctagtagtttaacacagagtttaaggttcttggaggcccaacctcctttttttttttttttttttaaatggatagagatgtagccagaaagctagaaaggtattgtgacaaacagctctctgggaaaacctggccagtgtttttgctgtggaaatgtagtggcacatactaaaagcattaactcagcctctttattttcactaccttttagtaatcattcccaagaagaaaaagagttaagatgttattcatgatatagttgattactgacatagagataatgatatgaatcttgaacatacaatttactaatctagattgttgactgagagaacattaggttgaatgttaactaatttaatatgttgggttgctttttaaatgacattcatcatttaagacatctctagtattattctaaattatcaagaggatttataaactagcttttaatttcattcctgatatgccttttatgctgcttagttttgtttgagtatccagtgtggattctgggtgttttgtttttttttttttttgagacggagtcttgctctgtcacccaggctggagtgcagtggcgtaagctcggctcactgcaagctccacctcctgggttcacgccattctcctgtctcagcctcccgagtagctgggactacaggcgcccgccaccacgcccggctaatttttttgtatttttagtagagatggggtttcaccgtgttcgccaggatggtctcgatctcctgacttcatgatctgccctccttggcctcccaaagtgctgggattacaggtgtgagccaccgcgcctggctggattcaggttttatagggcatgaagcttatataatttggaggcaacagctctttaaggacaagatcccattgtgggtgtgggtgcaaattttacaaaagtatataatgatgtgaatgtgtttctagggacccttctgggacagaatgaagacaagctaagcttcatcttctgctactatcacaaactgagatgacacttcatatttttttttatcttgaagggtagtccactatatttggaaagagcataggcttatgttacaactgggattcaaaaatgggccttctccatcttctttgctaccgttagagtcttacgtacatctttttcctaggcaacaacagctttcaaaatggtattcacatttccatctttgtttttttacacactccttccctatagcctgttctctacagtgcagctgaagaaccctttttaaaaatgtttcagtgacatattcaggatatagaataaaatccagaatttttaaactattttcagtgttcttcattcattcccaaaatctaagtttctctctgctgtcatttctcttgagcctgaaataatttttttagcacttcttatggttcaggtctgttggtgaaaacttctcttagatttcctttatttgaacattctctattttgcctttattctttattcttgcagggtgttttcactggactactgagttgacagtttttgctttcagcattttgaaaatgttccactgccctctggtcttcatactgcctgatgaaagtttgtgttttttgttgttgtttgtttgttttgtgtgtttttgtttttgagacggagtctcactctgttgcccaggctggagtacagtggcacgatctcggctcactgcaaactctgcatactgggttcaagtgattctcctgccttatcctcctgagtagctgggattacaggcatgtgccaccatgcctggctaatttttgtatttttagtagagacagggtttcgctatattggccaggctggtcttgaactcctgacctcaggtgatctgcctgcctcagcttctcaaagtgctgggattacaggtgtgagccaacacgcccagcctctgatgaaagtttatcatcattccaggattggtttcataggcatgtgacctatgttgttgcataggtacccgtacttagaaagatcctgtgtttcattaaatgttctactattgctatcttgatacgcttaatggcttttgaacaagggccctgtattttcattttgcactgattctgtggtttcttctattttatatatattatacatgaaacaaaccagaaaatcttctctgcctattgggtaagaattgtcttgtatctaggctgcctgtgctagataataaggatcatcaagatttaagtagatttttttttaaacattcgaccaacttccaaaaacagtttttaggaatagaaaataaaatttataataataagaatactcattcatatttcacagacattcatagtttataaggttatttccatatactttctaattttatccttataaaagccctatgagttaggccagtaataattctatccccttttattgatatgcaaatacaggcccaagagaagttatatgaattaatcttaaatcagtcaggtaaccattcttctctgattaaaatctagtttaagattttttttctctagctgagcacggtggcctgtaatcccagcactttgggaggccaaggcaggcggatcacctgaggtctggagtttgagaccagcttggccaacatggtgaaactctgtctctactaaaaatacaaaaattagctggtgtgatagcacacatctgtaatcccagatacttgggaagctgaggcacgagaatcgcttgaaccccggaggtggaggttgcagtgagccgagatcatgccactgcactttagcctgggtgatagagtgagattctgtccaaaaaaaaaaaaaaaaaaaaaattttttttgaaccattatagctaaaaatagtgaatagtgacattttttagcacacttttttcccaaaatgtttcataaatataatttcatttaacctttcagctagccatctgatataagcagtattcattatcagtgtatttcccttttttgaaatgaaaaagatctaaaggtacaaaaaattatttgtatgggttacataagtaatgtaggatctaaagctgtcacccaaatctctaactctaaattgtgtccatttttttaatattgcactatcttttgttgtttagagatgaattcaacaatatacaatatacatttattattagctcaccaatatttttactttgtgtctttagactgcatctgatgtcgtaggaagcactcaacactttattgaatcaacaaataatgaatgtaaaaaatatcttttggcagcatctgatgtcctttggacttttgcttctttattctgttctggaaaatgtactatgaataaaactgctttttctctaatctcaaatgaactgcataatatttccaaaatgccgtatacctgcattttgaattatgagtcaactgataaaaaaatttaaaagacttctgggccaaaagggctatttacatgctaagtaatatgccttgggatgaaaacacattataaatatttatatttaaccaattttctctaaacccttttggaggtcttttgaagatttctttgtttgctccttcctagttcgctttctccctcccttttttcctccctttcttatagggaatgctattctgtaaaagctatattctatcttctgccaaaccctcaaatctaattttggaacaacttctgtaggtaatttaagtacagaagatagatttaatgttcattttacttttgatttatatatgacatctgtttggaaccaaactttctctgtttttagaaacagagaaaaaaaatattttgggatatgtaggccagaggcaaatgatctgacaagttagcccccttgtttctaaaggaaaaattgccacagtttataagagtggtataaaggccaagaagttgaccaagaccaaaggagatcacaaagaaagcatagcatatagtagactttcaagaaagaagtttactgaatgatgaaggaaaatatgtgtctatggtttttatggcctacctagcatataggatatatcttctttttttccgacccactaccaaagaagagttataaaattcctgtcttcagtcgtgttgacctaaaataagatgtactgtggtatgacaataccaacctttatgtgccttattttcagactttgtgcctttagcttaagtagagatattggctaatagctgtaagtcttgctacttttctgttctcagtgtgatgttcaaaattagtgaaatgcagacttttatttctttcctcaaatgtaagtcatttctgtttctgtagttattaaatgctttttgataatatgaaaaaatatacactgcattggcttttaggaacattttcgtcatatatatttcaaactttaattaggacctctaacaacaaccatgttttaaaacaaagtttggcagcagttggctttttgttttctttatagaaattgaaaaggtgctagaagaaggtgctgagtaattttaaccacatgcaatgtagtaatcacctggaaatcacacactttctcaattgtcttattgctactatgaaaaacaggaataaattttagtcattaatacatttattctttttttccagagaaaaattgaagctgaatttaacacattttattgacttgtatatcacatcattcatgacacaatttatattttatttgtgcacatgattaacactttattggaattattactattataaaattgtaagatacaattggatccaaattttttgtggaattaaaataagccaacaataggattatctttaagcatttagaacagaatgggttaaactgtcattattggtcagaacaagcaaataataggatgttttacattttattttgttgctggttttggttggtatagaacattattatatacaaaatactatttgagatgtgtatatcataaactatagcattgggaatcttttggtcatgccgaggtttttcattggaatttgttgtagcatttgctgtaactggatttgacctgtataaccaatagatagtgtaggatgttatcctttaccagtagttttctgtaactattatgtgtacagtctttgtgtctcagcccacatttataatatctgcacatcttaacaggcacctttttgaatgtaaacatttcagagctctcaagaacttaaagacatctaatcttgctattgcatgcttcaggtggtaagcatgtcactttaaaaaataagacagatagccatttaggactgggagaagctgtgaatttctctctgtcatccagtgaataagtggactagaactttcctctgttatttccagtagtgtttggcaaagatatgaagaatatttgcaacaagtgaatttagaatttgtcacaaacttagattctcatgaaatcccccaaaatgtgaggaacaaattagacataacttaatggtctttatactaacagagttttataaaatcggataagtaaaacaaaacagaaacaaacaccttagtctcactgtcttgtctgttatattttattaatgatgcggtttagacatattttccattaatacagtgtatgcctgtgttacttaataattgaagtttcttttaactctgttcatgttggttaaaaccattttttatgtgaagttaaaatttacagatataaagacattccagggatattgggtaaatggttcttctgaaaatttccaaaactttttaaacacccatttcgtacacatataaacaaatgttagttgtaactgccatacgtctagtttattagcaagttcaaaggatttgaactatatttataaataagtttcttctatttagagggaagaaaagttatttgttgaatatcgttgtaattacttgagtgatacagttttgctattttacaatcaatcattgttctcataaagttctgtaggaaatactgcctatttaatacctttacacttgaacaccaccaacaattttgtttcccttcagggcatacagctgtttccagcctactcagtgccatgtcaggacataaaattatcttgacagcaagatttaaattataaatagtcccataatgacattcagcttgggcggtacatttataaaagtagttattaaggaaaatgtaattcaacccattactataactagattctctcacatttctgaagctgtcttttggtagcccgataatatttgcatatgtaagcatttaaactattaaggctatcaagtcaacaagtataaaaacataatatagatattagataaatggtttcctaaaattttccaaaacttttctattacaaatacgtcttaatatatgtctttgccctatgaaaactgataaaatattggggagttgagaccccaagatcttgatattattcaaaaagcatagactggaaatactttatatataatgaaagaagaaaagaactagaagtcgatttatcttataagcaacatcagaatattggatagtgaataacattttatgagcacttttttcctagagtaaatgttgactgtaagttacttggtgttagtgttctgatttttaaatacccaatttaccatcttattagtacatttagatcctatgagaatgtacttttagccaaagtcatatttttctctgaaaaaattatatttattctaaaaaagctttactatttgaataagtgttgctgtgagtctattttatgctgcgtgtgtacctagttatttcagcatctgaaagtagagatacgtaacagaaagtgaatgggaagatcagtcaatcataacaatatgtaatatgggtccatgttgcagagccacacttatcaaagctttagcctgtgttgtggtcatcactgaaaaaatctagagcatagctggtttgaagctggcatggtggagatgttagtgttagattaacagtaacatttaacctctgtgatataaacctctatgaaacctctgtttaacataaacctccgcatgtttatgtgtgtgtgtgtgtgtgtgtgtgtgtgtgtgtgtgtgtgaacattgattttatttctgaagtctgtagtttataaacattattgcattgtgctgcttagtgggccaaaaattacccaagatgattgctgatcccaacttcgatcttctaattcagtttttaatcaaattttctttttttgattttgactccttctcaatagagatatttcttaccgggcttctgccagtttagcaacttcatttctctcttaagcatgtcttagaaacagcctaatgtatttattctttcctttcccaatttctgtctcttaaaaagggatttctgtcaaaggttcagtgttctgagttgttccctatgctacctaatcactttagccacttagctttgaaactgcctgatgaaaaaggaagttgtactggcatatgtaggtcagttcctttgatttctcatttttcttattcccctagatagaatgatgagaaagtttagtatttttagctttcttttaaacagctttatattctgggtggttttaagccaccccaatttctgatattttaaaagaatcctggtgtttattctagataagacacctactatataaaataatattttatgttgatgttcaacaggaaagggacactaatcagtccacctgatttatttagcaaatattattaccttctactgtgtgccaggcactgtacttgccactgaggataacagcaatgaaatatgttatcagaggagctccactgcctagtgaagaagatgatcaagcacactcagacctgtgttggttagtcaatggaattgcttagtaaattatttcgggtccctgcagtacggtctttttgatcttctagtgaatacatccctggtctgagagttagaaggttttcataccatttctttctgctggcatttcatctttcatcatatatttaatacagtataatcttgagtaagccatacatcatttttataaagttagtaatgtctgttacaacatattatgagatctttgggacagaaatgctgagtcaacagaaacattatcctttcaacaaacatgcactgagtacgtatgattgaagcactatgtgttaggctccctgagtgatacagagataagcgagacaattatctaggtctaggagctgacaatgcagtgtattggatggaaacgaggtatgggggaagtgtagaggagggcataacagttaagacatttctttagtgctttcttgtacaaagcaaatgtatgtttaaatgagaatcttattattaactttattctctctaaccctttatctcttcataatgatttgtagttggagattttccaaacctcagtgggcactgtaaactcaaaaattaagttagtttattatcaacttatttaaatagtgttctttagctttgccttcactttcacttgcattgccagagtacttaatcgttattaagagatattttttaaaaattctactatttgtgtcagggttttcaactttgaaaaatatgccaaaccatttcatcgggaaaaaaaaagtcctcaaagaccctcttttcaccagtgttgagtgtgtgtattttatccagtgttgggtgtgtgtattttatccagtgttatctaaatacatggagatatacaattaaatgcaaactatactcttaactctcatgaccataatctattagaagcaaactataaaatcaataaaaatgtatatttgccatattaatctaatgttataaattaggttgtcttccagaaaataaattactgctgacagtgtgaatatgatactgagagctacaacacagatttttttttgagctttcttttaaaaagcactattacagctatgtaaaattaaattaggttctttttctggtgctttttcagtgcttgcaattccttttttaaaaactaggacaattaagattttattgtgtgatgctggtaagcatggagtagaataaagcagggtattgtaaatcattaatctaaaggatagtaatatttattttaatgaaaggcaatagaattatattaggctagctttaaaataatagtggccatcactagtcgtcttcttcactggataagatagttaaaggaagggcatttgtgttttttgaaggcattatatttctacagagttatgaggatctataatatatataacaggctttccctaaccaacaagcccctttctaggtctaaggaaaatccatggcactctttcccaccaagcccagcttctcaagtcttctttactagctcataagataaaccaatggagggccgggcacggtggctgatgcctgtaattccagcacttttggaggctgaggcgggtggatcacgaggtcaggagctcgagcccagcctggcaacatggtgaaaccccgtctctactaagaatacaaaaattagccagacatggtggtgggcacctgtaatcccagctactcaggaggctgaggcaggagaatcgcctcaacccgggaggcggaagttgcagtgagccgagattgtgccattgcactccagccggggtgacaagagcaagactccatctcaaaaaaaaaaaataaaaataaaaataaagataaaccagtggatttagggggaaacaaaggagacacatagagggtataaataaagcagaaaggtatggagagacatgcataggggtctgtttccagccatttccagccaagttagtctataaatactggggaaatgtgtcatgttagcaacatatattactacatttgttactgaattttggtcactagttattagcaaggaacatatgaaactaaagatgcttcttgattttttgatacaaagcatgtaaatttaaaattgtatttcccaataaggcatctctggggaaaatgaattaatttgggctacttcttagcttaaacccttcacagggctgcgtgcagtggctcacccttgttattccagcactttgggaggccgaggcgggcagtttgcttgagctcaggatgagaccagcctgggcaacatgttgaaactccatctctacaaaaaatacagaaattagccgggtgtggtggtacatgcctgtagtcccagaggctcaggtgggaggattgcttgagcccggaggaggcaagatcgcaccactgcactccagcctagatgacagagccagactctgtctgaaaaaaaaaaaaaaattttttttcaaaggccttaccacttcttatagcaccctcatgattttgttttttctgtgagaatagggttccagacctcaaacaatacctagcatgcaatagaccttcattaacattttaatttaattgaacgctaattgcatgaatctgggcacaacatgttggcagtaagtaaatcttttccatttttagtgtattctagggcagagcattcaagactggaagtatgaaagcaagttagaagagcagaaaaatccaaatttcacacaaacctaatagttagagttcagtttaacagacatttattcagtgctcaacatttcccactgttcttggaagtcagtaatatgtagggttgtctaaagccacattgttgaatatgtgtagaatgatgaaagatataagtgatataaaaaataattaaactcatgattaagattttgttttttgttttttaacttggactgcagagacatctcataaagacaagagcatgagtatttcaagttttcttttgaaaactgagtcatagatgttgcatttcaagccaaggtttgatcattctatacttcatggctttttaaaattctagttgctataacaactttgatatttctttattatttttagcacttcagttgccataacaataagatatcctaaaaaatagcaattttcttttataagagaaaattttcttttaattaaaaatgaatgtgaaccaacacttcttacctataatgtgaacccattatttaaaatgggtctgtgctcttctgttttcatacaattttagcagacttttgtaggaaatatcttaaggttcaacttttctctctctgtttttactgtacaaaagttgaagggatacagctgttttgaaccctttctatgagataattctaatttttatgggatttcattgatataaaaatgaaatgatataaaaaatttaatttccagatttgttagtttataaagcaggaaaagatcgtgattaatggatagttgtaagccatgggaaatgtaagaaacgttgaaatttccttttctcctgtgttatttttaagtgtattttcatacctgttgccatactaaaacaggtacctcctcacttatctggaaataactgacagcttaagcctgagctatggcactttactcatagagcagttacctttatttgctctttgagaaaaaattcttataagcttagtttctgatacagaagcctctagaaaataaggacagcaaattagaacaggaaggaggggctatgctgtgtttgctatgcacatagattcataaaatatagagttatgtattatttttaaggtacctaattcttatggaaatcaaacaaatccagcagctacaaaggtatgattgtatcagaagacagtattcgaattgatgttaatagtgatgatcctaggctaccaaatattaaattatgtcagaattcttggtttaagaagacagaggaatagataatacatcttttaagaatttagatgcctaatgtaatagagtaaaacaatttttttttaaaaacttgggatcatttttctttttcttttttaaagaaatagtttcaacttttatttaagattcagggatacacatgcaggtttgtcacatcagaatattgcatgatgctgaggtttggggtatggttgatcccttcacccaggtagtgagcatagtacccatagttttttaagccttactttcctctctccttcctaactctattagttcccagcatctattgttgctatctttatgtccatgagtacccaatatttacttcctacttacaagtgagaacatgggtttttggttttctattcttgcattaatttgcttaggataatagcctctggtcgcatccattctcctgcaaaagatatgatttaattttttatggctgtgtagtatcgcatgttgtctgtgtaccacatttctttgtccagtctgctagcataaaacataatattaaaaatcaattttaaaaagccccccatttatctgggaaatgtaagatccacgtaccttaggttttcgtagactaagccttggtaatttttatgttactttattgctaatcacaggattttcctaaaaaacatggtcaggttcagacaatgatatttcttttcttttctttctttttttctttttgagaaggagtctctcactgtcaccaggctggagtgcaatggcatgatctcagctgactgcaacctctgcctcctgggttcaggcaattctcctgcctcagcctcctgagtagctgggactacaagcgtgcgcctccatgcccagctaatttttgtattttcagtagggacagggtttcaccatgttggccaggatggtcttgatctcttgacctcgtgatccacctgcctcggcctctgaaagtgctagtattacaggcgtgagccactgtgcctggctgatatttcttttctttaatgtactttaaaaaaggaatggtgagggagttggcaattcaatagaaaagagaaagtgttattattaatttccaaaactcagcatgttacctgtggttgcagtttctgaaggaaaaacgattagatagaaatcttactgatggtaaaataatatgcttatcttactatcagtgagctttgaatgaatagccactgtatgctttacatgctttaagttttagttttcataaccaacttttaaaggtaagtattattatctccattttaaagatagaagctgagatacatggagagaaagatatacccaaggcctcatagttaatgagtggtgcagccatcatgccaacccaaatctgtctgactataaagcctacattctttcctctaagtcatagtatctccttgtcttcaaacttaataaatgtttattaaaggtaataacatacctagaggaaaatatgagaagaaaggtcatactgtgtatggttttattttattgctctgcatactgttttgacctattaattttgttttaaacacatattttgtgtttgagactttctcccactaagaaggtggtaaatatacacgtaaattagtatttttgtctccatttttctttatgatcgagaaacatagtggaacctctcaaagtttttgcttacttggcccattgtcttagatctcagctagctagggcagtctcaaagtgttgtataactggcatttgatatgtcttttctcagtgtctcacttgcagctgggctgttgtgtcttgagtacaaacactgagccatgagtcagatatactgattgagtgtgaaagtatgtgcaggctggatatacttactccatccaccagtatctgttcttttagacattttagtagctctcattctttatggcacattgctacaaaggattctggtatgtttctttttaaatatcattatactatataatttcctggcaatgccttaaaattcactcaaataatttagggctctcatttcgtggctttacacagaactcgaacacttgattacatgcaaatgccatctcagccttttcagtctcttcagctataacttacacaggtcttaaatgatacattttaatgagctttgacatgcatgcatgtgtgtaaccacatgtatcaagatacagaatgtttccctcttccctgaaagttccctcatacctcttgccagtcttgactggtacatgtgtgcacatgagcgcatgcgtgtacacatacacacacacacacacacacacacacacacacacacacacacaccctgcctggggcaactagggttctgatttctttcagcaaaaattagtttttcccatttcagaacttcatataaaatcatgcaatgtgtattcttcaatgtatggcttctttcctttagttttaagattcatccatgttatgtgtgtctttagtgttgttccttttcattgctatatttcattgtatggaaatatcacggtttgtttattcattcccctgttgatggatgtgcgtgggctgtttctggttttggctatttcatttttatacatactgctatgaagatttttatgcaagtcttttgtggacaatatgttttcctttctattggaaggaattgatgggagagatagggtagattttcttttaatgtcataagaaaattccaaactgtttgtcaaagttttcaaagttgagccattttacactactaccagcagtgtatggtttcagttgttctatatccctaccaacattgtactgtcagtcttttagttttagccattctagtgggtatatattggtatctcattgtgggtgtatattggtatctcatctattttgccttttcctgatgactgtgggtgctgagcattttttcattttcttaatggttatttgtatatcttcttttgtgaagtgtcttccagttttttcaccattttaattggattatttgtattcatattaacaaattgtaggagtcagttatatattttggatgcaactcctttgttagacatatgttttgctaatactgtctttggcttgctgattttcttaatgatgtcttttgctaagcagaacatttattttaagtatattttattaaacttttttatagttattgcttccagtatcctaataagtctttgtctattttttaagagacacagtcttgctctgtcacctaggctggagtgtgttggcatgaccatagctcactgtagcttagaactctggactgaagcagtcctcctgcctcagcttgcaggtagctgagactacaggtgtgcaccaccacacccagctaaattttgtttttggtacgaacaaggtcttgctatgttgcccaggcttgtcttgaactcctgggctcaagtgatcctcctcgttaggcctcccaaagtgctgggattataagtgtgagccactgcacctgttcatctttgtctatccttaagttatgaagacattcttcttctagaatgttttcctttagaagctatatatttgcagtttcaatttttttttgtttagatctatgatccatatcatttaaatttttctatatattgtgaggacatggtctaagttaatttttccccagaagattattcaaatttttctaataccatttactgagaaaattttcctttttccttgatttgttttagaatttttaattgaaattcagttgaccatataagtgtgggtttatttttagactttcttcttctcactgatcattttgtatattctttatgcaagatcttaactcttttttttattattattatactttaagttttagggtacatgtacacaacgtgcaggtttgttacatatgtatacatgtgccatgttggtgtgctgcacccattaactcgtcatttagcattaggtacatctcctaatgctatccctcccctctcccccgacaccacaaccgtccccggtgtgtgatgttccccttcctgtgtccatgtgttctcattgttcgattcccacctatgagtgaaaacatgcagtgtttgattttttgtccttgctacagttttctgagaatgatggtttccagcttcatccgtgtccctacaaaggacatgaactcatcattttttatggctgcatagtattccatggtgtatatgtgccacattttcttaatctagtctatcattgttggacatttgggttggttccaagtctttgctattttgaatagtgccacaataaccatacatgtgcatgtgtctttatagcagcatgatttataatcctttgggtatatacccagtaatgggatggctgggtcaaatggtatttctagttctacatccctgaggaattgccacactgacttccacaatggttgaactagtttatagtcccaccaacagtgtaaaagtgtcctgtttctccacatcctctccagcacctgttgtttcctgactttttaatgatcgccattctaactggtgtgagatggtatctcattgtggttttgatttgcatttctctgatggccagtcatgatgagcattttttcatgtgttttttggctgcataaatgtcttcttttgagaagtgtctgttcatatccttcacccactttttgatggggttgtttgtttttttcttgtaaatttgtttgagttcattgtagattctagatattagccctttgtcagatgagtaggctgcaaaaattttctcccattttgtaggttgcctgttcactctgatggtagtttcttttgctgtgcagaagctctttagtttaattagatcccgtttgtcaattttggcttttgttgccattgcttttggtgttttagacatgaagtccttgtccatgcctatgcttgagatctcagaatgggcagactgcctcctcaagtgggtccctgacccctgagtagcctaattgggaggcaaccccccagtaggggcagactgaaacctcacacagccaggtactcctctgagacaaaacttccagaggaacgatcaggcagcagcatttgcggttcaacaatatctgctgttctgcagccaccgctgctgatacccaggcaaacagggtctggagtggacctccaggaaactccaacagacctgcagctgagggtcctgactgttagaaggaaaactaacaaacagaaaggacatccacaccaaaaacccatctgtacgtcaccatcatcaaagaccaaaggtagataaaaccacaaagatggggagaaaacagagcagaaaaaccggaaactctaaaaatcagagtgcctctcctcctccaaaggaacgcagctcctcaccagcaacggaacaaaactggacagagaatgactttgatgagttgagagaggaaggcttcagaagatcaaactactccgagctaaaggaggaagttcgaaccaatggcaaagaagttaaaaactttgaaaaaaaattagatgaatggataactagaataaccaatgcagggaagtccttaaaggacctgatggagctgaaaaccatggcacgagagctatgtgacgaatgcacgagcctcagtaaccgattcgatcaactggaagaaagggtatcagcgatggaagacgaaatgaataaaatgaagcgtgaagagaagtttagagaaaaaagaataaaaagaaatgaacaaagcctccaagaaatatgggactatgtgagaagaccaaacctacgtgtaattggtgtacctgaaagtgacggggagaatggaaccaagttggaaaacactctgcaggatattatccaggagaacttccccaatctagcaaggcagaccaacattcaaattcaggaaatacagagaaaaccacaaagatactcctcgagaagagcaactccaagacacataattgtcagatttaccacagtggaaatgaaggaaaaaatgttaagggcagccagagagaaaggtcgggttacccacaaagggaagcccatcagactaacagctgatctctcggcagaaaccctacaagccagaagagagtgggggccaatattcaacattcttaaagaaaagaattttcaacccagaatttcatatccagccaaactaagcttcataagtgaaggagaaataaactcctttacagacaagcaaatgctgagagattttgtcaccaccagacctgccctaaaagagctcctgaaggaagcactaaacatggaaaggaacaaccggtaccagccactgcaaaaacatgccaaattgtaaagaccatcgaggctaggaagaaactgcatcaactaacgagcaagatcttaactcttaaggctttatagtatgtcttgaaatcaggttgtgccagtctttcaactttgttttttgttttttctctttcccaagatcgttttagctctcttagatcctttgtgtttacatatagattttagaattagtagcttgtcagttctacaaaaagctgcttggatttgaattgcaatagcaatgaatctgaagatcaatttgagaaaaattgacgttcttaacaatattgattctcccattgcataaagctagtaggctgggcgcagtggctcacgtctgtaatcccagcactttgggaggctgaggcaggtgatcacttgagttcaggagtttgaggccagcctggtcaacatagtgaaaccccatctgtactaaaaatataaaaattagccaggcatggtggtgggcacctgtaatcccagctacttgggaggctgaggcaggagaatcacttgaacccaggaggcggagtttgcagtgagccgagatcacgccactgcactccagcctgggagacacagcaagactctgtcaaaaaaaacccaaaaaaagtgtgtgtgtgtatatatatatatatatatatatatatatatatgactttttaatttttctcaaatgacattttatagttttcagagtagaggttttatacattttcacctactttctgtttttcaaggctactttaaatgatttattgtttttaaattttgtttcctactgtttcttacaagtatatcgaaatgcaatgatttttatatattgacctgtgttccgacaaaatttattcattaattctagtgggctcttgggaagacattttagtatttcttatgtgcacaattatatcttccttttcttgtatggcttttttttttcttgcctgttaaactggctgggacctctagtacaatgtgtatagatgtgtaagagcagatatccttccttttttcccagtctcgggaagaaagcatttaatatttcaccattaaatatttcaccattaaatattatgctagatgtaggttttcccataaagtgtctttatcaggttgaggaagttttcttttgtagtgccactaaattaacttttcttaaatattcttagttgctaataatttgtctcataatgaaatgaaattgacaacatgaaattgttttctgctcttgagcggtcactaaatcagtagattgtgatatgtttcacttcagagggtttatttgattcttggcacttagaccaagttgctttaatactacagttgatagtacatttaaagtgcattggtactgtattttgcagcatttggcattttttagatgataagtaattaaataatcattgtcaattgctagataggacttttcaaagcactagtgaaatactcagtttagtttagggagatttatagatgactaatactgcccttcatttgaatatattaggaggttaattccccctcccacaattgggaaatgcattttctagctttttcttgtgaagtttgtgtattctgagcttcacatagactgggtgttagtgtttttcagtcctttgatagactcttttagctattttatgtgctttatattaaaattatgttaaacacttatttgttcgacacctattctgtgtctagcaccgcagtgtaggcacttgaaatgcaatggcaaagaaagcagatgttgctctcctcatgggacttgtaatctagtcaagaagacaaaggtgaatgaagtaaataattataaactataatatgtgtagaatctggtctggttccctgtgagaactcaaggaagatttcccagaggaagtggtgttaaaactgagacctaaagattgcatctgaattaaataaaaagaagtgtgatggcctagtaagcagttataaatatcctgaggccgtagggaacatagcaaatatatttgtgactggtgggtgagggatatgagttggtggggaggtagaggtagtttagctaatcctaaacaacatagaagagaagtgagactggatggatgcatagagaccagtttttgtagcacctattaagatcttatcataagggcaatgtaaaaccagtgaagtattttaaaacagaagcaacgcgatctggtttgcattgtggaaaaaaatattttgtctcttttgtgaataatggattgaagagagactacaaacaactcaaggccacattggaagccactacaggtgtctaagcacaagatgatgctggtttgctagggtaatgatagtgaagatggagaaaagttaccaggtaggagaagtagttgaggaaataggtaaattctgaatgcgtaagccttttggtacatttttaaatttattgaaggacaacaggtttactttagtctctatttgtttatttttttatttttattttttgagacagtctcactctgttgctcaggctggagtgcacggtggcgtgatctctgctcactgtaagcaattctcatgcctcagcctcctgagtagctgggattacaggcgtgcaccaccatgcctggctaattttttgtatttttagtagaggcagggcttcaccatattggccaggctggtcttgaactcctgacctcaagttgatctgcccgcctgggccttccaaagtcctgggattacaggtgtgagctaccctgactggtctctatttgtttaccttctttgatactatattgcttgtatagttctctttgataggcattgcctactgtttatcctatttgccattgatggctaatggtcctttctggctttgctgtttaagttctattgaggagtagtttgaattgactggatgttttaataatgaaatattgataaatataaaagaataaaagtattatatatatatataaagaataaaacatatccaatatataaataaaaaattaaatgcctgtgatgtatcatgtaataaagttatacagtttgggctgtttcaagtaattccatataatgattcctcctagatattttctgattagcattcatcagttgaaagcagaaggaggcagctgatgattgtaaaaaaaaatggcaataataagatacctaatgaccccgaaaatgaagcgaattatgcctaatttaaaaacaaagaatgctttatataggaaactatgtaaatatatattagtactcttttgtcagtaaggcttcacattataaatgtgttcatattataatcctatcggaaaaaagtatggtaagaaagaaaagtaaggaagctagcacagtcagccaggtgtggtgtctcacgtctgtaatcccagcactttgggaggctgaggggggtggattacttgaagtcaggagtttgagaccagcctgaccaacatggtgaaaccctgtctctactaaaaatacaaaattagtcaggcgtggtggtgcatgcctgtaatcccagccacttgggaggctgaagcaggagaattgcttgaacctgggaggtgaaggttgcagtgagccgagatcatgctattgcactcctgcctggtcaacaagatcgaaactctgtctcaaaacaaacaaacaaacaaacaaataaaaaacgaacaaaaaaatgaagtagctagtacagtcagttgctaaaaagaaaaaactactttgagctgctgaagctttttttttttttttaaagttggtggaaagaaagagggaggcttagtgggtcaaaggcactgcttctgaaactcttcatctcatgttttcatctccctttagaagcatgtgcaattatcaattatttatagtatttgtagattcaaatagctaccagtgattatttttggaaacaaactaaagggatttagtatgtgaaattttctgaatgatattttttgccattttcctaattttataaatattatgattcaaaactgcttcaaatatgtgtaatggctatactttttcaatggtttggtagtaaagcttagcatttaacttttctttacaaggaatgtgggacctatctacattcacgaatatttatcaaatataattttattttaaatatttatttttcttgtactagagaatatctgattttgtttgattttaatactattatctctgaaagtcaaaatatttccctataaaataggactttctagccttttgtataaaatttaaatattgccttttcatccttaaacatagtattcacttgaaaatcgttattctaatgtatcttacaaacgtctcatttctggtaatgagaaatacactttctgttctatattcacctaaacctccaaagattttggcagtaacatggttttctctgaaaggaagttcaacatggaggaaagaataggaccttctactctttaggaataatttttttccaacttttattttagaatcagggagtagaaatcatttttacaattaataatacataatagttatatatggggtacatgtgatattttgatacatgcatacaatgtgtaatgatcaaatcagggaaattgggacatctgtcatctcaaatgtttatgacttattgtattggtaacattctaacttctcttccagttattttgtaatatacaataaattgttaactataatctccccactacaaccactagaacgtattccttctatttgactgcatttttgtaaccattatccaacttcttttcattcctttttccctacccttcccagcctctggcaactgccattttactcactacttcaataagatcaacttttttatctcccacatatgagtgagagtatgcaacatttgtctttctgtgcctggtttatttcactgaacataatgtcctccagttccaatcatgttgctgcaaatgtaagaatttcattcttttttatagttgaataatattttattgtatatacatattgctttttttccccacctgttcatgtcttgatggacacttaggttgattccgtatcttggttattgtgaatagtgttgtaataacatggtagtgcatttatctgtttgatattgctgatttcctttcttttggatatatacccagcagtgggattgctggatcatatgatagttctatttttaaatttttgaggaacttccatactgttttccataatggctattttagttttacattcccccaatagtgtatgagtgttctgttttctctgcatcctcaccagcgtttgttactttttgtctttttggtaatagccatattaactaggtgagattatatctcattatagttttatagttttgatttgcatttgccagaggcaaaatgagtaatttttcatataactcttggcaatttctatgtcctcctgtgagaaatgtctattcagatcttttgctgactttttaatagtttttttctgattattaatcacttgtcagatggatagtttgcaaatattttcccattttttaggttgcctgttcaccgtgttgattattttctttgctgtgcagaagctttttagcttaatatcatcctgtttgtctatttttgttttgttgcctgtgcttttgaggtcttactcaagtagtctttgccaaaaccaatgtcctgaagcatttcccagtgttttcttgtattagctgcatagtttcaggtcttacctttaagtttttaatcaactttgacttgatttttgtatatggtgagagataggagtctagttttatttttctgcatatggatatccagtttttccagcagcattgatggaagacactgtcttttcaacagtgtattttcttggtgcctttcctgaatttaggttgactataaatgtgtagatttatttctggtttctctgttctattccattggtctatgtgtttttatgccaatatcatgctgttttggttactataactttgtagtgtatttggagtcaggtagagtgatgcctctagctttgttcttttttcttaggattgccttagctattcagggtcttttgtagttccatacaaattttaggttttttttttctatttatttgaatgtcattggtattttgaaagggattacattaaatctgtatgttgctttgggtgatattgtccttttaacaatattaattcttccaatccatgaacatggcatatctttttaatgtgttgtttggtttgctagtattttgttaaggatttttgcatctatgtttctcagggatattggcctcctataattttttttgttgtatgtgtccatgtctgcttttggtatcaagatagtgctggcctcacagaatgagtttggaagtattctctcctcttaactttttaagaatagtttgagtggagttggtattagttcttctttaagtgtttggtagaattcagcagtgaagccatcaagttctgggcatgtctttgatgggagactttttattattgcttcaatctctttactcattattagtctgttcagattttctatttcttcatggttcaatcttggtagattgtatgtgtccaggaatttagccattttttctaggttttccagtttgttggcatatatatttttcacaagtctccaatgatcctttgtatttctgtggagtcaattgtaatgtcttttcatctttgattttatttatttgagtcttctttcttttttgcttagtctagctaagggtttgttgattttgtttatcttttcaaaaaatcaagtttttgttttgttgatctttttatgttttttaggacttttaagaataataataacctatttcggtcccattttcacaagtctgtgattataggcaagttatacttactatctctactatctgctttcttcatttggaaaatgataatgatgatacctacttcatagagttttaagatttttataaaggaaaagtatataatgcacacagcacaatgcttggcatatagaaaatactcaacaaatgttagttatcttccatttttatcttaattttcctggtgtattttaattctgacataatttgtaaattagttctaagtcacttttaagaaaaatgctgatcccctaagaagtttaaaatagtgaatgtttgtctgtagtaagtcaaaataatcagaaatgttttaatgtccatcaaatatttgattaaattaatttgcattgttctaatttaggtatgtgtagctcaagcacttagaacaaatttctttgaccatttgaccttttttttcatattaggataaaaagtggataagcaatgtttttatttattctaatttctatgctcttttgagatcatatttgaccttcagtattgctctgaatagattttggtacagtagtgttagttctattgctttgtttgtacagttaaatacatcaaactcagcaattttttgtgggggtgatggggattggagagattagtaaatgatttctaagttctgttaattaaaatgtaactatatattttagagagaagttagtagtcatatcactttagttcatgaagacttggcaaatttttaataattaataagttttttctgccaatgagcattagattactgctgactttttagtgtcatagtaccttgtggtagtttctttacagggtttacaggagtatggcagtttattttttctgtcttgtccatacgaaataatctttacaaatgctataaggagaataccttgagaagttcataaatgccttaatatattataaagatcggtcagttccattgtcttcttttgtcagtcttgatcggagcttgccgagtaagtctataagcctgcatgtgcctggcaactgttacctagtgacagtttcagctgcagtagccattggctgtgctgttgattggggcaggagggccgagtcacctttctgatggtgagtttttctgcatcagcccaggatgaggaggaggagtagggcttgggctcaggtggagtcattgatgctgagagattgtgaagaatatactgacagcatccttgtagctgcatcacagtaaatcggacttctgaatcaagcagcccagcctagcagctgataagagtgaatgtaggtgagaagcattaccttattcctgtaacaagagaactgttttgtgataagtgaaactaggaatgtagaagaagaaatatcctatggctattataaaagaagaaggacttgcctgaatgacttggtggtgcaccagaaaataactttcagaagaatgctttctgttaagctgctgcattgttcctggaggaaatgttatttctaatgcatgttatttcttcaaaagataggataacaaagaatgacaggagactctctgaaatgacttcacttttaaaaaatactttggcaaatgttaacctgatatcaaaatgaccttggaagcattttggatggattctatcctggcagccttgcaatgtttcaaactctaggatttaaagttcatcttgatactttagaggtattttaaaataagactatcttgcaacctacctaatggcccctgtgttaattgagcacttgctcaaaatagagtacagaaaaatagaagaggcattttttaacatatggctgctacataactgcaaatgtaataaacaaggtaattttccactttcagaagatatagttgaagtaatgatttaatgtgttaaatcatctactgaaaatagaaaaggtatagcaacatagaacatgaagcctattagaaatacctaagtaataaataatggcagcatttctggtcaaataagctcggagtatattggaaagttttattgtctaactttatatttacatatatatgtgagatatgggtatacagttgcaaaggtgagaaataactgtgagctacatattttattatcatgctccattataaggaaggtggtatatgaaataacaaatgttattttaagttatagatgccaaattaatagcaaaaataattcattttgaaaaggaagaggtataagttacgttgctgttagtaccaccagtaactgtaatggattaaaactgctttcatctaaatgctttaaaaatgcatgcagaattaaaacttcagaagtttattacattttgccaggtgttaattcattaattcattgtatattctcttttctattggaaaatacttttttctcatgagagttatagggcaatctggagtctgtttgttacctctattctgcccatgtagagatgaatcttttcaaattaactttgatagagttgtttttcttagattttagaaaaatgagaaataggttataaatttgaccccccaacatcaatccctgaactaagcccaaagacactctttgccacaatgaactttttcttagcttttcaaccaaatttgagatcttaaattatttaaaatctaaaatatgaatgcatttttcatcatagataaagcaggaagcctgagacagtttcagagtttttcttttctcattctttccagttgctccctaagaaactgcctctcttaggagaacagcccacagaagcttttcttcctttggcaattcattttttttctttttacagatttaatttttcatagtgcaagataataagaagtctattttctctagaagtgccttatgtctgcaaaaagttctttgagggcaccagaggaaactaattagtgacctcttttcacctcctttctagcttatccccttctctccaccccttaccgccccccccccacccccccgcccgaaagctgaggtgtgtcactgctgaactgaggctggtgaagagacttgagcactctctgggactctcagctgtgacagaagcactgacactgtctactgaagcaggttctgaaacactcatgtgcggtgtttaacagatgctgggcagggcatctgcttgctgtagccaagtctgcaggtgtctttaaatttccaagccatgaatgaatccaggtggactgaatggaggatcctgaacatgagcagtggcattgtgaatgtgtccgagcgtcactcctgcccacttggatttggccactacagtgtggtggatgtctgcatcttcgagacagtggttattgtgttgctgacatttctgatcattgctgggaatctaacagttatctttgtctttcattgtgctccactgttacatcattatactaccagctatttcattcagacgatggcatatgctgatcttttcgttggagttagctgcttggttcctactctgtcacttctccactactccacaggtgtccacgagtcattgacttgccaggtttttggatatatcatctcagttctaaaaagtgtttctatggcatgtcttgcttgcatcagtgtggatcgttatcttgcaataaccaagcctctttcctacaatcaactggtcaccccttgtcgcttgagaatttgcattattttgatctggatctactcctgcctaattttcttgccttccttttttggctgggggaaacctggttaccatggtgacatttttgaatggtgtgccacgtcttggctcaccagtgcctattttactggctttattgtttgtttactttatgctcctgctgcctttgttgtctgcttcacttacttccacattttcaaaatttgccgtcagcacaccaaagagataaatgaccgaagagcccgattccctagtcatgaggtagattcttccagagagactggacacagccctgaccgtcgctacgccatggttttgtttaggataaccagtgtattttatatgctgtggctcccctatataatttactttcttctagaaagctcccgggtcttggacaatccaactctgtccttcttaacaacctggcttgcaataagtaatagtttttgtaactgtgtaatatacagcctctccaacagcgttttccggctaggcctccgaagactgtctgagacaatgtgcacatcctgtatgtgtgtgaaggatcaggaagcacaagaacccaaacctaggaaacgggctaattcttgctccatttgaagagagctacatagtaaatcaaatgtaatctgacagtggttttggatcatattctagattcatctggaaatttgccatcagagaaatatttacttgaatagttgactgtaaaatgaagtatgagactaaaggtttctctctttttttttctttttcatggaagaaactaaagggaaggatgtatagagggttagctcatgaaataattatagcatgtgagtattagtgtgcagtaataggaaaaattaagcactgagatgaaaaagaatatctcaaatcttctgcaggacatgagcaagccccttggctcagcatttctgtctttctgtctgactgtaccctgcctctgtctttctcattttgtctatgtttctctcactctttgtggaagttattacttacataaactgccctttgtagaaaagtgctacatattatatatgtggtaaagtataatcttttgcatcaaagtgtacctttaatcacactaatctataatccataagtgatctcttcatggaggatgcacagtaagcattgcattttattatttgccaaacaacccctttgcttgtgtttttataatgttctctgcagcacagtttttctgctataaacaaatagaaacagtatttttgtttcttctgggtaaaatgacatttgcttttccctggtttcctaacagtctcctgttttttttctctctttttcttgatctgcatccattggtaccttactttagaagtgtcttagctattgaaagaatctactgtatagagcatccatgatgttaaataatgtatttcttccagcaaagcaatctggtagcttattaaatatttttaatggcttttggaaacatttttatctggttccttttaaattagttcatgtgcttaaaagtgatgtcttttttttgctatagtaaagctttgtttttctttaagaaaacccactagtaattgtaatgcagatgcaggatactcacccagcagtgaggtattactcttaagggtacttagaatgccctttttaaaaataaataaataaaataaaacatgaatcttttttgtgttaggtctacgatagcttactgttgtgtccactagtcagtcatttgtgtgatatgcgtttgcacatactatgtttttcacagcaaagaaaatgtaaattatgttatctgtgcctaacgttttcttagcaaaatatatagatcaatgttgtttaagttgtcaacattggaaaaagtatatacaaaaacctattttaagagaaaaatacttttgtgtaattgttatttagatatttatattagacaaagctgcatttttagtgccgctgagaatataatatacttaattatcaaatacaggtaagagctgacagtattttcttttgtaatgatctgttttcaaatgcagagattaacttatttttttgcctgctacatggggttgtgtgataaattgtcaggggtttagatgtagcaaagtagcatttggggaattagcgaagcaagtatgagcagtaaaacatctaagtattacttttttaccataagtttcttgcctgaaagatattttaaaatttatatcaaactactgagtatttttcttctcagcatttttgatttctttgttttatgaaatgcatttaataaaatgtgcctatgactcttcaaattagaagccaaccatgtttgcaccctggtggtttggcttcaaaggtcttttagtagaaatgttgtcattttattgaggttgttctgaacccctgtatatttttaaacatgtaagaaagatttaaaataaagaataaaataatattctatatatcaaaatgagactttgcctcagtttaataaaacacttaggacaagagtttacttttttgggaatcaaaatctgattgttttatacttctgtagcttgggtttatatttattcttgtcccctgtttgccagtggcatcttggtttaaatgtgccttttaaattcagaccagttcaaggaaaacaaagttcaaggaagtgtactgctaacatttcagatatcacatataagacttctaaattatacatattatttgggaatcgtatttttatttctttaaggtataaatatagttagaaaggacccagtggattctgtgtacagaaagcctgaggccatgcttactgcattttccccttctggcttttccccatagtaattaataacaattatatgccaggctcactgttcacttttacatgtgttataccttaaatcctcactacagccttttgagataatagttattatttccactccagagataaggaaacgaaagaaaaatgattattcgtcagttaactagtcaatggcagaggttcccgcccatccagtaggcctgggccaaagcctgcctgcttcaccggtaggctgcgctgctttcatttcaaaagcctttaaatttttgtacctctgtctgtaccttttccctacaatatttctctgagttttatttatttttttctcatcgtaagtcttttgcttgagttcttttcttgtcttgtgatatctttttctttgatcttaaaagtttcttttattaaaacagcaatctgataagctcaaacttaccagtttagtctataatcaaactgaaattgttgatattactttggtttacttttgttatttcccttgaatacctttttgaaatctctatcaatttctttttggaaaaaaattgttttgaagaggaagagtgaaaagaaaggctttatcataggctgaaagaggctgaatgaggcaaattctgagtttatttatttactatagtattttatatacaactctaggacaaaccacttaacttccttttatcatattttaatgtgtttgtataataagctaatccttattttgaaacctctctttttaggtaatgtgttttaagaataggaagcataaccatttttctcatcattatattgtattttgtggtaattatccagtttggctataaaagacagccaaaaaacaatgcattctgtattctttttcctaagggttctattatttgcatagttgtttctagagttatagagtgttggaaagcttcataattgacactattagtatatgaaacttgggctgagatccaggccctcataaactgcttggccttgggtaagataccaaatgctccaaaaccttagttttggcattgattaaaaaatcttaagtcagagacttgtagctctctgtttagctgaatttgaggactaaatgaaattttgtagtctgtgtgcccagcatagctcctggcacataaaaagtgttcagaatatggtagctgctgtttttgttttgttttttgtttgtttgtttgttttgaagtggagtcttgctctgttgcccaggctggagtgcagtggcactatctcggctcactgcaagctccacatcctgggttcatgtcattctcctgcctcagcctcccaagtagctgggactacaggcagctgccaccacgcccagctaattttttgtatttttagtagagccggggtttcgcggcgttagtcaggatggtcttgatctcctgacctcgtgatctgcctgccttggcctcctgaagtgctgggattacaggtgtgagccactgcacccagccggtagctgctgttttgttatctttgtgggtgccatatttattaacatcacaacttaaaggtcactaatcccaattcaaacaggaataaaccattgagcattagggttttctaagatagcatttctttttgcaaatctatttaaattcaaattttggggttaaactcagatatttcaagtatatttctgaaagctcgtttcccaggaatagttattcatgaagacatcgtttgagattaaagatatccagcaagcggatgttgtgatgagacaggcatgattctgaggttaacctacctcttactttattacactaaatatgcttaaacattttattctcgttagggaagtaataataggaaggattgtccagggatgtcttgtcatttgtctttgcactttaattttcctcatttattaaaatgggatttgaagtattttgtcatatatctatttcttgggagaaacaatgattaataagctgatttgctccatagataacataaattatgtgaatttaaagataaatgaagttgccttaaaggacctttcctctttttctccccacgctagaaggtaatcattagatgtgaaaaagatacaattacataataagtagataaaaaagatttagatgtgagaaatctgctggtataacattctgagcatagatagcatcatgtatgtgtaggtagggccattttggtgcataggagcatgtatgtgttactcagtcagtgctgtactctgacgtgtaggttccaaaagatgctcttttccttgagcagaaattaactttattttagattgagtgatatgtagaaagtggtaatcctgtaaccaaatacatagatattgaggaaaacaaaattgctagagtagagaaaacagttcctattttatgatttctcataaatggaagtttgattcagtgctagtcttgctctgtattttaaaatattcataacttttttcaatagtaaaagtgtttttttaaaatattaacatgatgtcattaaggtttttcttcatgactattttgttttaattttttacaatgagcattggtaaaaatttcttttataatcagaaaaattaatatttggttaaaaagaatgctgaaggctgggcgcggtggctcacacccgtaatcccagcactttgggaggccgaggcgggcagatcacgaagtcaggagatcaaagccatcccggccaaaatggtgaaatcccatctctactaaaaatacaaaaattagctgggtatggtgacatgcacctgtagtcccagccactcgggaggctgaggcaggagaattgcttgaacccgggaggcggaggttgcagtgagccgagatcgcaccactgcactccagcctggcaacagagtgaggctccatttcaaaaaaaaagaagaagaatgcggaatatttaaaaaatattttaacatttcacaaaacagcttatgttgatagtacaaataacactatccaataatgtctcaatattgtcttataaagataggttatatagtttttctgagttctgtaatttttatttcaggtagatttttacaataaacttgacaaccttctacttgcaatagtagatgttcttgacttatttttgctttaatgtaaacagtttgaggtattacttgatgaatctgaaatggatctcaatcactgtaggattttttttttttttttttagacagagtctcgctctgttgcccaggctggagggcagtggcgctatctctgctcactgcaagctcgcctcccgggttcacgccattctcctgtctcagcctcccgagtagctgagactacaggcgcccaccagcactcccagctaattttttgtgtttttagtagagactgggttccaccttgttagtcaggatggtctcgatctcctgacctcctcgtgttctacccgcctcagccctccaaagtgctgggatgacaggcatgagcgaccgccccggcccactgtaggatttttaaatgcatcattcatggcacctttctgcatttttcacacctttaaacaacaaaaagatggctctgcgttaggaaataggctccagctggtacattacctgcatttcctacataggcagaattctccaaagaacatatttataattttttaatggtaacttttattctgcttttatatatgactttctccaaaggtgaagaaaataacagtaataaatttagcaggagtctgttatgtctgataaatatttaacatgaaaggcacatatcaccaccttcattatagtaaatggagccaaattagtttttgagattctaaaattctaaggtttaaggtgataaatatcaagaaacgtagtacataatagtagaattcatgaatgaaaataatttgcaaaaatttgaaaacttccaaaaaggatattttatacaaaagaaatacctatcattgacttaaacatttgaccccagttttattttattttctacttaagcaattgtaaataaggttgatgccagttaaaaatggcaaaatatatattataaattcaattattttaattgcaaggcacaaacaaggtacagagttgtatgacctgttctttaaatttttaaatttatttttgaataaaatgtggactgtagcaagagatgtgcagtaattttgtctgagattatacatgacacaaagaatgtttatgtacatactctgtaaagtatagctttaagatgtttacttatgttcttaatagagttctaagtttaatataattattagtagatggcgtatttttatagaaataacatcttcacaattattcatttactttttcaggaattttataattaaaaatgctaaattggtaagaaattattggaaaacactgcaagttgaaatttggaaacacttataacgcttttgaacatatataatgctcttgacattataaacgaggtctattctaaaagcttctgtgagtaaacactatctcatttcacatataggaatctgagataagatttttaagtgaccctaacaagatcatgtcgtttgacaaagatactactgacgacgtgtcttgtgtgacaataatattgcctgtgataaagttcttgaataatgtatttatagatggctggtaatagagtgacctgatatttctttcttgagaagaaaatgaagacttagttatttgatatagaagaaattctatgtgaatttttttcttttaatttgtgacataggaaaaattattttaaaattaactttatgttggaggtgtgatttttgagatcatagaaatttttaatcagatgtattatcaggcttgatcagtgttttaatatttcttttaacagttttttatccatagagggtaataaaaaatttacctctccttttgaaaacacagcagtcatctactgaatatattgagatatgtagaataaattgaaacagtgtttgctgtgtattctaaacactataaccttaatgatgaagacatcaaaatcacgttatattcaagtacctacttttggaaagtactaattttatagtcatatactttatgttttgaatttttttttgtaatagatttgcaatgttgttgagtcatcatcggttggatttttctcagtcattatgatggacaagattttgatgtttcaggctatagtgcttttgtatgtttgtaatctataaattatcagtcagggaatcagtgattagtttgaattagtgataaataaaaccttttaaataagtaattcagttttatttcaatgaaataaatatagttacagaaaaattaaaggaactcaaattaggcaaacacaaaattgccttgtaagtgtccttagaggaaatctttctttaagtcgtttctagtgtctgtatcagttgaataaaaatgagttccactgagttatttgaaaagtttattctcttaaatatgtaaaatttccataacaatttatgctacttatttaaacagtttgtaggatgaatcattgcaaagtccaaatttggatttaatctgaattaaccagatatttttgcatttcaaatctataaattaggtcaataaatatttattgactatgctatgttaagggcataaattgtggttctataatagtcctggactcttaagagtaactcattgaattgtgtgaatccaataagcaggaaaattaatttctagaatttgagggagagattgcagaaaagtcataggaactatgcaatacattgtagcgttagagggattaacgcattttagaatatgaattggcttcaatatttagccatgtgtttggatgctatagttctaaaggataccacaggatatttgagaagtttttgaagtgaaaggagagaaaatgttcaatgttcagattagtacaaaagtgttgtggggagaatacacaataactttggaatgcagtgtaagtaaaagaaaatattctttatgtggattatatctgattagagtaaaatcatcattttaggtataaattataagctttgagattaggacaataatattaacatgggtagaagtagcttgagggattgcacataggacatgttctaccaactcaggcatcatcttttttttttttttttttttttgagatggagtcttgctttgtcacccaggctggagagtgatcaccagtgtcacccaggcagtggagtgatcttggctcactgcaatgtcctcctcccaggttcaagtgattctcctgcctcagcctcccaagtagctgggactacaggtgtgtgccaccacgcctagctaatttttgtatttgtagtagagacagggtttgaccatgttggccaggctggtctcaaactcctgaactcaagtgatccacctgccctggtcttccagtgatgggactacaggtgtgagccaccatgcctggctttaggcatcttcttagaccactttttctagagttgttttcctaatatttgtcttgtgattacaagtgaatgtcactatatgcaggttattatgacaggcaggttttaacttctctgtcaatcaagttaatcatatgatgtaggcctaatattttgaataatagaatcactcattctttcatttaagtatttatcaggttgctattgtgtgccagggactattcttaattctgtgtaagataaggagatttctaagtaaaacagattttcagttctccaagagcacttagactacaaggggctatatggactttatatggataactatagggcaagataggagctgacaaattacagtccgctgactattgtagatacaattttactggaccatagcagcactcattcatttatatattacccatgggtgcttttgtgctacaatggtagagagtagttgtcatggaaatgttatgttctacaaagcctaaatatttactttacagaaaaaaatttttcagaaaaaaatttacagaaaaaaaatttttttctgtacagaaaaaaatttgctgatgcctggtatgagacattataatgccctttgtatgctactcacagtagaatgttgtgcttttatgtttgctaaaggatctcatacgaaggagtgatttcaacctgattcagtcaggcatcaggaaaatttctagcatatgaataaaaacctagatattgattcccctgtatgattccagtggtttttcagctatatacctgtctgtaaatgaaacacagatctactttttctaattagttcttactattatatagctaatctacattacttatatttagatttttcctactcaggtaaagttctttgcatatcaaacttagtgtctagtttctttatttaactactaatataacataatcgtattttacctttaagcatggagtcagtaataattaacattggatgtagtcttcaaacttcagaagcatttattaaacttctcatcaataaatgataatctcatagtctaaaagagttaatttacttataagtaagcatgcctcttttgtagtactccaataggccgtaaaacaaaaaactaaaaaacagaagatatagctgtataagagttaaatttacatgcaactctaaaacatatatgacttaagagaatttataattcaacaccaatgtatgacattattaataggctcttggtaatatataagttagaaaataaatggttatagtcgtacacttagctaagatgtattgcagtgctaggagttttatgttttttgtcattgtcaactaatgaatgaaaatacaaagcaattttaaagagccacaatttatatttacacaaaattaagccattttaaaaatcttgatgattcagttaatcagaggtatttgatacattatttaataatatttgctttggcagtactattgttttaaactattaataatccattgggaagttttggttttcttcaagtttagtaaatcagtaagaaaatgaataaatgatcttgatgtttttcttgaaaatacagttcacggagtctgttagaataaaaggaaacacttacacagttgtccctcattatctgtgtgggattggttccgggatgccccaaggataccaaaatccacagatgcttaagtcccttttatataatcacatacaataacctacacacacccttccatatactttaaattatctctgagttacttacaatatctaatacaatgtaaatgcaatataattagttgtattgtttagggaatagtgacaagaaatgtacaaatacatttcaagtacatgtacaagtctgtatgtgttgaacacagatgcgaccatccatttttttcccctgaatattttcaagcagtggttggttgaatcgatggatgtgaaccctatgaatatggaggactgactgtatatgcttttatgctttcagtactgtttaaagtcactgagatagtagagccatcattagaacccatatagtcagagtgaataccttaataatgtttattgtatgttttcccaaacaaatgaatagaaaaattttatgtaaaattgtgtattaaaagattgtaaatggtcaggtttccattagtttgattttgagagaaagatttcagagaatcattaggtccttctgcctttttcagaccagtcaacggactgaagggtcttaagaaaagacctcagggatttcttatagagataatttgagtgacaaggtatattgtttccacgtttttatatacccaccagcttgcccttccataattggcaccttttaatttctgacaatgttgtaaaaggatgagttatagcaaatcattattaacttatctcaaatgtttctaattctcatccctttcacataattaacttcctttttttcctcctcattcatttagttatttttatttttaattgtcaaagaaatagttgctcataaaggaaatttaggaaatgtttaaaatgataaaaaagagactaaattacgcatagttctctacccaaatataattaggtgtgatgataatgactgttgattttggttttcttttcttccatttcccccctatggattagggctttttctaaaggatttttaaatatgggtatttataacttaaacatttttccatattattgcatattgtttatgaacatttttataaataaggcttttccacatttagtattattttcttacaatttttaaggaagaaatactgaagcaaacagtgtgaaggtattttaagattatttatgtatattgccaaattggtttcccaaaggagtgatccagtttatcttcacactaataatgtatcaaactatgatgattcattgcaaacttgctagcatcaattctacattaataaataaattaaaggaatttgattttttacttatttcttcctagcccctatagggaatttgtttagttctttgcaattttttttcttccctacactaaaacagatagatagataggtaggtaggtgggtaggtaggcagatggatggatggatggatggatgaattaggatggatctgctgagcctcatttaaaccaaattgtctcaaattctttatttcagaagtctttaagctcagataatcttctcactattgttatctcacaatttactctgtgctactgctgctttgttgtttaagaacactgaattctgtcagtgctgttctcccattattactgctatcttcagcattgtctgtttcattgtatcttgtgtgtgccacacagccacctagatattgcgtttgagaaaggtttcgaaatttttttctattgtattcttctgcctttgttgcagtgataatctctactggcctttcaaggtaggggaggatatgttcctaagcagaaaattttgaggcctgtgtccttgaagagtttgtgaacatcaagatttcagtagttaagcactgaccccaggcctggtattgatacttaggatttccctaacctgcagaaccatgggaatagtatccatagtggtagagctgtggtaagcaaatcagcttttacgttagaaaagtcacacctggtgtgattgtctaacaagcaagcatgcttgcaggtctgtactgtttctcttctttatgtcttttacatctctctggttcctcagagtgctttgtatatagtggctactcaattatttgttgagccaagtacagagtgctctctgtatagtaagtcatctatttcttgagccgaattgaatttaattgtcagagttaacagtagttcttgggtctcttccagtagttctttcacctccagctcacttgagggtatggttggactgaagattacttcaagattattttccccagtgccttgctgttaccaactggggaagctgtggaaaagaatattttaggagagttgaacgatgatttaatatacctatcatttaatatagcttcccactttaattgaatttttccttccaaaattgacattcagtggacttataggctctttttgaatatgcgtcttaaaggggggtgaatacactttggggtagctcaggttttttccataatgtttatttatattcagctgaaatgaatatatttttggcttattcccattgtgattatataggaagaatgagaatttttgttttacccaagaaccttctgtataccttagtaaaagcattgtttctgtccaggcttctcttggtcttgaaccattcttgtaaaatatggttttgaagctcatcaccaacttttccctgactatgctctaataatacttcttttaatggtgctcagggctgaataaaatgttacgtgtgtgatatgactagtaacagatgagagcgagactatcattttcccttggtttataaactattctgctatttattcaggccagaaataaattacatattttggtagttatagtttatcctttaatatatcaagtttgttttcaataaatctatacatctgttttacacctgcttaatttatattccttctccatatatgtacaatggtttttttaaacaaattttacattgttatctcccttcaacttcatcttgttagagttggctcagtttttccagcatttctgaaacctttgttccatttctaatacagtcattaaacttttgacttctgcaaatgtgatatacattttttttcaacttttattgtaggttcaggggctatatgtgcaagtttattacttggggaaatttcaagacactgagctttggggtaggaatgatctcatcaccgaggtagtgagcatagtacccaataggtagtttttcaaccctcatccccttccctccttcctctagtggtccccagtgtctgttgttccaatctttatattcacatgtaccaatgtttagctctctcttataagtgaaaacatgtgatgtttggttttctgctcctgagttaatttgcttaggataatggcctctacctacatctgagaacaggaacagatgcttctcaaaaattctcaaaagaagacatttgtgcagccaaaaaacacatgaaaaaatactcaccatcactggccatcagagaaatgcaaatcaaaaccacaatgagataccatctcacaccagttagaatggcaatcattaaaaagtcaggaaacaataggtgctggagaggatatggagaaacaggaacacttttacactgttggtgggactgtaaactagttcaaccattgtggaagtcagtgtggcgattcctcagggatctagaactagaaataccatttgacccagccatcccattactgggtatatacccaaaggactataaatcatgctgctataaagacacgtgcacacgtatgtttattgcggcactattcacaatagcaaagacttggaactaacccaaatgtccaacaatgatagactggattaagaaaatgtggcacatatacaccatggaatactatgcagccataaaaaatgatgagttcatgtcctttatagggacatggatgaaattggaaatcatcattctcagtaaactatcgcaaaaacaaaaaaccaaacaccgcatgttctcactcataggtgggaatcgaacaatgagatcacatggacacaggaaggggaacatcacactctggggactgttgtggggtgggggagggggaagggatagcattaggagatatacctaatgctaaatgacgagttaatgggtgcagcacaccaacatggcacatgtatacatatgtaactaacctgtacattgtgcacatgtaccctaaaacttaaagtataataataataaaataaaaaagaagacatatgtgtggccaacaaagatatgaaaaaaataactcaacatcacttagcattagagaagtgcaaatcaaaaccacaatgagataccatctcacaccagtcagagtggctattactaaaaagtaaaaaaaataataataataacagatgttggtgaggttgcagagaaaagggaacacttatatactgtaagtgcttattttataacatctaatttgatataatccagatatttggatttttcagatgagaataatttattttctaagcttatactacatattggattacaaattttttaaaggctttctgtttacccatttaggaaccaaagtataatttaatatatgattatttgatagcatttactatgagaaatgttaccatttgtgttccataactacacttaaaatatggaaatattttaatacagatacctttagcatttgggacatatcttgcagagagattttcaagaatgccttttagtggagatttgtgaaatgaaagatagtaaacctttggggtttattgcagttctgcccaaggacaaatgaatgaatggatgacttttcaaagtaatccttacaaagttataatttgtgatgctttccccatccttaattaattgttctctttaactactttcacagaaagcccatctactctcaggaattaaactatcatccttttgccaagtattccaaaatagaactcttcaaatctggccttgtaccttttctccaggagcatatactatgctgccttcaatgagccttcttattctggggttttcataaaaattgaaacctgaacaatttcaaaggaaaatcattattaccatttcttattccttacactgctcatctctttttttgttgttgttttgttaatgtcattagtaccactgccttcttatatttccactttatagccctgtctgtttaataaatgttaattgaaaaaaagactacctggattttttttcttctaccttaatcactctttcatttagaatccagtttatacacttcattcttcactgtcttttaagattctttctctgggtaaccagatcacttttttttttgcttcttccatagaaagattaccttctttttttgaatctttatgtatagttttattatattctctatgtgctttgaatgataggaactttaggttaactgataacttatggatacagcctcctaccatggctaaaattcctttcataactagcaaggtagtctcttcaattattataaagttctgtgacttagaaaatacttcctaattaatgagccccaaaatcttcctattgatcctattgacataggatcaaatgtccaccatttgatcccatgtcatatctctgtggaaacacagaaataagtctccctttatgatgtagcttttctggcacatgaaaactactgttatatctgccttctcttctcagattaaacatctttatttctttaacacattgctaattcattcattcagcgaatatttattgagcattttttttgaggcggagtctcgctctgtcacccaggctggagtgcaatggtgtgatctcagctcactgtgacctccgcctcccgggtttgagcaattctcctgcctcagcctccagagtagctgggactactggtgtgtgccaccatgcccggctaatttttgtacttttagtaggctctgggtttcaccacattggccaggctggtttcgaactgctgacctcaggcgatccacccacttcggcctcccaaagtgctgggattacaggcatgagccaccatgcccggcctattgagcgtcttttgtgtgcaagtcattgtttaggtatttggaatctggtgaacaggaatgataaactcttttctcatagagcttacatccaaatagagataaaaagtattctatattaagatgccagcaagtaaaaaaaaataagataatttcagattatgattaatgccatgaaaagaatagaacaggacatcaggatggagaagtgatagagatgggaggcagcttctccatgaactttggtttacaaatatctcatcattttggttgccttccaccacaacaacatgcatggacttggcacttttaacatatgatcttatggtgaaagacttctgatctgctaatgtcctctgtgtacatagggaagtatggagcttcttagttatgtgggagatgaagctgtctgaactacatcagtgagggaactattaaagaaggagacacaaaaatttagaccttttgcagttatcgttagccgcagtattctcttgctcagtgtgctcttcttacagtgggatgagtagttgccatatttggacaatgtgcttcccttagtgcagctccacatgtaatcagctgttccaacaacaggtcaccttagctttgtagtgaacttatttaggtctagatctcacctgtttggaacttggaaaatcagtttattgaacatagttgcagggctttgcagttattccttacttactcagcacttccttctactttaatgtgatctttttctaatgtttttaatagatttagaaagcttatgttccttgttgtctttaaagttagcaaaaatgatgtatacagaagagtacctaggcaaaacttagtaaaaagctttcttctaaattgatttttctttatttaattagcacattttgagtaaggccataggtctacctcaaactgtacctgaacctgttaatatctagttcccattttttccccttttgtttcaaatattttataaaatgtttgctaaagacagtgaagcataggctgggcatggtggctcacgcctgtaatcccagcactttgggaggctgaggcgggtggatcacttgaggtcaggagtttgagaccagcctgggcaacatggtgaaaccctgtctctactaaaaatacaaaaactagccaggcgtggtggcacacccttgtaatcccagctactcaggaggctgaggtaggagaattgctttaatctggaaggcggaggctacaatgagccaagatcacgccactgcactctagtctgggcgagagagcgagactttatccccgcccccgaaaaaagagagagtgaagcataatggtttagcctgccctctagagtcaaactgaaattttttattcatcacttgttacctgtgtaatactgggcatgttacctaacccctctgaccgttggtttcctaataattgtattggctttatagggatatgtgaaataatgatatataaatcatccctcacaatgtctggcatatagaaaagtccaataaatgttagcagtagcagctgtagtcattgttgttcctggcccacagaaattaaatatagtctattttgggctttccagatctaaaaaccctttaaatgcatgtgcacacacacaaatatatacacagctagttttctgccatttattcttagggatggacacagtaaaaacatctttattttttacatcttatatgccatctgtctagaattttactagatgaagcatcaatgttaccatctctgaaatccatatgttcttattgaaagcttaaaatttgtcttctctgtagtcatttatcatcttttcaggggtctacagtttctcaaagattaataatactaccagatcttctagtagctactttgatatttctttgtttgagcctagttaaaaaaaaaaaagacatgggtatgagaggctgaaaataaagttgagaattgcctgggtatttcacttagccatgattctcaggtctttgttagacaaagagtaaaattatctataccagggaagagaaataacgtttctactaaataaatgtaaaagtaaccactaataaatactaaataacagagctactgtatgacaagtactgtaaatatatattcatgttatataatatgtttaatccttttagcaactccttttcataggtgagaaaattgagcatcagtatttaagtatcttggttatcacacttctactaagtggcggaatctatagaatttgaatccagctttgtctgacaccaaaaccatatcctttctacctaatatatgctacctcccctactatttggcagttaacgttatactgacatgtatattaaactgaaactatataaagagaagctaataaaggcttttttgctatagaagatatttctagagtcagagaattgatgaggatccatgagtaaacttggcaaatttccctcaataggaaaacgttagcattttagaaatattataaaatcgtgaaatcttagggttgaaagaaaccttcttgattataagttttgttttctggtcacatagcaattatatatgggattatattataaagaattaattttattattgctgtatctgtaatattttgagacttaagataaattattgcttttgtttacttatttatttaccttatttacttctttataccactgtattttaacagtttcttttatattgtatagtctaatggttacacaaacatttgtgtgtaaccattaggataaacaaatagagatttcagaattcttccacatgtaagtgatgccctagtactctaatttataatagagggattgttatggcttatactgaaatactagaagagagttttgcttgcaagacgtgtatacacataggctgatttcatattaagtaattctgctttattataataattcatcctgatcattgttcaataatggattcacattctaccttggttttgtgattgtgctggtgttgtagtataaattatagttattatgcacttcaaatttaaatgttattgataagtaaaattaaacactttccatatgacagcgtgggcagatatttttgtgtagtatgaaacagtgaatttcaaatagtagttaatttcttaaactaatattgagcattatatccctaaagataaaaaagtttaaacccagagaagaaatcatagacactacatctatatctacctctttctctctctctctctctgtaaaatcattccagtttcttctgcttagaacagtaagttccatggggcagggactttgtcactttccccactgtgtttctaccacctagtgcaggatgccatacgtggtagatgttcagtaaatatttgggggcagactgtgttggctttgcagataagtgttatactaaaaatgaggggaatatttttgcttttgagtagattacactgctaatcatttcagagttttgcttgaatatttctgggggtttatgtttttcctgctctgaatttctagatgccattagcaaaatgttttatacaaaagttaagaacagaacgtttatatttgtgttaagtatatgcttatgtgtatttatgttcatgtctttttatctattaatagaaaagtgcagctgttactgtattttgtcttatcaattgctaagggttaggtaagtgttgctttgatttgtagtcccaggtaataagtttaaatctttgtgcttatatataattgtatatgaatatattgctgacaagggaaattattttggttatcaaatatcagaaagtttcatattattgtctgtatctttctgataacaaggccactactttctagtaaatcaggtattttctctgatgttaattaatcctttaagccactaatccaacatttctcagaagtataaacgtggacagtttacatcagattcactggtaatgcttattaaaattacagattttcagcaactaccttagtcctcctaaatcagaatatctacaatgtgagtctctgaatttgtgacaagctctgcagatgatttctctgcaatcagaagtttgagaatcatagtatgaaactttcctggaagtgtctttgcccttaggaggggttccatcctggaagctctacagaaaaaaatccctcactataagctctctgcccatttaagttccagagtagtcagtcttaagacactgattgtgtcagtttgaattacaaccaaaggtgcattatttccaaaagctgttggactggaacaaaacaagaacatcaaaattgctcactagaccaatattgaaagcagacaaaatggcactcagttccagttcctgacaacatcccaggaaatgtctcagctgccttcactggggattgtcactgccaaaaatgctttaccctttaaagcctcgtggggaactaggcactgtagagctgagctgactggaggaaaaaaaaaaagttctacttttttcaggtctacaagagcagagctttctctggtactatgagaatttcagcctaaaaattccttgtatatgagatcttgaccatatgatcaaatcctctctacagccatgacccatcttgaattattttaccacttgcacagggctactactgcattttgcagggttccaaatgcatctccccatctcgcagaatagatatcattccatgtattgatccatctttttctcacttctctatcattagctataaactgattttgaatttcagggtttaaatcaggaactcttactttctagcccctcaaaagccagtttagaaaaaatgtaattttacatatgtacattctatgtaaatttgtttgtatcagagaagtggtaatgctaccttttgtatacaaaggtgatgatactgaattaaatttccagaagtaatgatgagtttttattcatgcatccatgttgtaatctctggccttccttgaattcaggggcattctaaaatgcagtgttttggcctggcatagtggctcaggcctgtaatcctagcactttggaaagctgagacaggtggatcacctgaggtcaggagttcgagaccagcctggccaacatggtgaaaccccgtctctactaaaagtacaaaaattagctggatgtagtggtggatgcctgtagtcccagctacttgggaggctgaggcaggagaatagcttgaacctgggagatggaggttacagtgagccaagatggcggcattgcactccagcctgggtggacagagcaagactttgtctgactggaaaaaaaaaatcaaaataaaaactaaaatacagtgtttagttagagaacagaccataccaattaatttttacataaattaaatccatgacttgcctggcattttgccctagccaaattaactagcctcagaagttggattttgcctctgtgtttgtttcattttctcagtcaagaattaagagtactgacattacatattaagcttttttgtatcccctggggtaactaactagcatggtggcttatacatagcaggtatttaggaaaaaaaaacacactttgatttactgatattgattatgtttcaatacaagggcagttcagctactttgcatggacttctttgggaaggatttactatgatttctatttctatattcgtgtatgtttttgtgtttgagttcagtcatacttattacttacccatcttcttattgaacctcccttttgatcgaatgtgattattgcattggtggtatattagttgttttgaagaattaatatttctttctaattcaagcctatgatgtgactcaggctggtgatacaatgatggtattaagacaatgttcatccccttcaacagggaaagtaaaactgttcaacttgcttttgaatacccagtatacctgttagtaatttatttaggaaggtaatagtctcttcatatattagaaattttgccacattaagcaaaatcttagaaaagtcagtatttatcagaatttaatattaggaaatctttttcaaaggaattgaacatatccaaatcggagctaaatactgtcacaaatagctctaattttttcaccttcaagcaaaccacattcaggtgttagctattggctctgaagtagttgttctatatactataggtgttggaggcccctccttggtggattttgaaacagtagaaactcataatgattgcattctcttaggaatcttacttaatctggctgcagcgtgcagaatttatttcaggagtcagaccagataggagactgttatggactgaatgcatgtgtgtccccctctcctggcgttcatatattgaacccataatccccaatatgactatatttgaaaacagggtctgtgaggaggtgataaaggttagatggggtcataagtgtggggccctaattggatagggctgattccattatacgaagaggaagagacatcagagctctctctacaatgtgaagacacaatggagaagtgtgtaatgcatgctgtgtataagccaccatgctagagaaagtggccgtctgcaagccaggaagagtcctcaccaggaatggaatcagccagcaccttgatcttggactttccagcttctaaaactgtgagaagtaaatttctgttgtttaagacacccagctgtatgtttttcttgcagccagggcagactgagactgagacagagacagagaacactgtcataatctaagcttgaggtggtaaggagtgtggcatcaggaaagacagcaatgagacaggtatggtgggaaaggaaagaaagtggtataagagaagggtccatgggacctagtggctgacagcatgtggggacaaaggatgatgtatattatctgtatttcccaaagtggggaaaattttttaagtccaattttgttgagggttctgccttccaggcccccaggtttggtgatttgctaggactaacaggactcagcatatagtcctcattgctatatttattacggtgaaaagatacaaagcaaaatcagtaaagggaaaaggcacatggggcaaagtctggaggaaaccaggcacatacttccgaatcttctcccagttaagttgcacaggatgagcttaattactcaagtatcaagttgtgaaagtatggtaaagtgttatgtgccagagaagcttgcctgagcctaggagttcagggtttttatcaagagcccatcacataggcaccctttgcctagaatatacccaaatttcagactctcagaaggagtttaacatgcatcacattgttcatataacagtttaggtacaataaaccacatttatcagggaataatggcaactgctgaaattcaagtttccagttgccagcaaagggccagcctttcaagcatttcattctaagaatagcagtctcagacctgcagtattaactgttttttgcacagtaatattttaaactagaaagggaacattaaatatatgtcactctgtttttcttactgaagtttgtgcataatagaaacaaattttaaccctaattattgtcttcagttggccacacaaaaggatatttttgagaagtgttaggaagagaaaaacaactctgaatacagtgaaatgttgccatgcgtttaaagtcagccatggaacataattttaggttatattctcctgtagagtaagagttatatacacagtatctttagtaataaatacctagagagctcaaagaggtaagatgcctttgctgaaggcaccatctcttgatgacataggatctctgtaaaccttgctggtgtgcagaattcctcatgtgtcaggtgcacaatcccaaagctttcctactttgtacttcaggttcaaagagatttttaaagcatcttattttcttgattttggtatagcatctactgcccagagcactagatgagtctcagttggaagtgggaagcagaaatagcataggttcaggagcttccagaaaacaggatgccctgacagtgttttcctttcctgtaccacgtgtggccctttctttccttaggatgttaccttagaggtttctcttgctagttaatagaaagatagttttgggggcagaccacaaattcctaggtatggtttgaggtaagcataatttgacacatataattacattatgttaaactttaaaagttctcaaactttattttaatgccaaccacatcttgtttagaatccacatatgtaaaacatgtaaaagctgagctgctgagcaggttgagctgaagcaggctgaggagtcctgcaatcattcgcccctaaagctcctgcagagaatcttaaaagttcttggagattgcttctcccctctaactccgttgtagtagagatgagaaaatgaatgatcaggaaattaatctatatcagttagttctttcaagtccttacaaacccttttctagaacttctttgactaaccccattttctcctgtagctgttcctgtaacgttttatataaacatagtgcttatcattttgttttatacataaatgtttgtgttgtctccctcagagtccctaacctcagtctattttttaaaattaattttagatcctcagtgcttaatgtaatcctagtatatagtaggtagttaataaatactgcattaaaatgaataaatttattcaatactttccatggaaattatttattcaatttgtagtatcattttgcattcttgatgtcttaatttcgaatggttctctgttaatttctgagattgtttatttcttcaactacattgtcagctttttaaaaatctttattgcctactccccaacataaaacccagaataataggagtattttggttaaccaaagagaattccatagaaaatgtcatgataactgtagctttacttccttcttactacctctcaaaatgttcctgatgtcagctagtaagagtgctctgctctttcttttatgaggccagtatgtaaagaagcagtgtataactgaaataatgtgaatttgtctccaggatctaccacttattacctgttgaccatggtcataatatcgaacctctctgatgatgatgatgattattattattattattattattgtgagatggagtcttgctctgtcgccaggctggagtgcagtggcacgattttagctcactgcaacctcctcctcctgggttccagtgattctcctgcctcagcctcccgagtagctgggactacaggcgtgcgtcaccacgcccagctaatttttgtatttttagtagagacagggttttaccatgttggccaggatggtctcgatctcttgaccctgtgatccacccgcctctgcctcctaaagtggtgggattacaggcgtgagccactgcgcctggccttctgattcttatttctgtcatctataaagcagggaaagtaatatctgccttatgataaataaagaaatgacatattatgtgttttaatgtatgattgtattaaatgtaatgtatgttacaataaatatttaaatattaataaatatcatttattaataaatatttaaatgatagctgatgtcatatacaagcaggtgtgatgaacctactagtggtgtttaaattttaacatgagtaaagatcaccttgggagcctgttcaattgcactttcgggtttagtaggtctgagttaggacctgcagttcttcatttctgataaactcctaggtgctgctgatgctgtagtctacagagcacacttggtgtagcaggcactggagtattcaagattcccttgttatgcttttttttcttttaacatacgttgaatgattggttggactgtctttggcagttattttatatcttctcagatattgtgactgtttttaaggtagttaacaataatattgtggactcatccagtgctttgttttgaaaacttttttgttacaatgccagggacacaatatttttaaaaatattttgtagtgctgtatatccaaatattaggggcaaacaattaaggtagacatgatgatcttatctacttttgtaggtaaataggtttattgaatttgaaaggatgccaagcaaggatttatggcatattaaggcagatcaagccaggaatggtggttcacacatacaatcccagctctgggaggctgaggtgggaagatcacttgagcccagaagttcaaggctgcagtgagttatgattgtgctactgcattccagcctgagtgacagactgagaccccgtgtcttaaaaaaaaaaaaaaaaaaaaaaaaaaggtcagatctttggccatttgcttctgctgtataattatctacaggccagtaattgaaagtataaacctaaattcgcaatgttagatgaacattataacttattagaacattatatatgtataattaacattataccagtatataacattataacttattatttagaaagattgtaaatctttctaagttgaagttgaaagaacaatagggtgggagtcaggagatgtgaattctgggtttggctccaacaaaggttagcggagtgaccttggaaaggtgagagttaattcttactttttccatgcattcatgatactttataaaaataacttttcaacaaagttctcagtcctctatgtaagagaagatcttacctatgacaattttctaacctttagcattctgagtttaaatgtaaaactatcaaatgctctgaaaaattaatgttgcctatgctatttttattttaattgtattaattttgttaataagattttaatagtaagttttggagcaatttactggccagctgaatatctaagatatttcattcaaatttgaatatgtttttacaaaaatataagtaaagcaattgtaaaaacttttacactataatttcagtttttttcctaatttatgcaaaattatctattaaagtaaaagacaaaacacaagagatttatgaattctttaatattatgttattcagccactatatgtaactctttcaaatactatgttaatttgtgagtacctccacaacaacaaattaaaacatgaagtaaggaaatggacatttggcactattgggaaatgatacttggttaagcagtgctttattgcatacttgatatttgagaggaaggatttgacaagttaattagtcttttctcttacctaagtgatttcatcactcaaatcctccagaagttccaaagcggtatctatctctgtcttcagcagcagcacaaaccaaaccttgagagaattctgacacatgatccccttttattttgaggacatagggcaagagatgtgcagaagcatttccttggggcttgaagatgttatttgtgagagtagatgttcaaggttacagatcatacagtgtcagtctgagggccagatcctagtggcagaagacgttcatgtgttcttcattaaatttaatttgggttatttgtgacagctggggccctctgaaacatagggtttgtggcagggtcccctctttcttagacctaagggtgatactgcttgtgtaccatagtcccaggagcagaactgggtgtgctgagatatcaaagttatgcatgtaatctcagccaggttattataattaaatattatttgggtaccagataaaatgctgaaagttaatactggataggctgctgtcataaatctccttagctaatctatatgtttaaatggcagccagacaactaaagtatgtgaacaaatagcattgcaagctaaaattatgcttttcataagcaaataaccttcactgtgcttcttagcatcttggagttgttctcttcttggttgtggctactgttatgatgttcatatatagtaatcatcaatgtttaacatttaggacttctgagcaatcaagtaagcattgaatttttatcttatttctagtgtagaaagtaggaaaggaagtagagaaaattttcaatttagtgttgattcaaagtcaacaaatagatgatggctatttcacataattttctggtatttgctttctatagcattgttttcaaagtcaaggttctcatgggggagaagtactggacatctggacatcttttttctgacagcattgtcataagctgtgataactattttatgtttaaaactaatgtaatcagacaacattgtagtgtgcaataggaacccttatataatgtgtgaaatggtaaaattatatttatttaagaggatattgacatttattttgtatttgactctatacaaaataagtttttactgtatctacattaagaagatctccagtaagtgctttgagatcaattagtgcttaaattagcatttagagatcagtcatttagagatttttttcaagtatttatataaaacctgcatggtatattttataaataggctgctaatatagataggattctcataggtgagtggtaataatgtcataaactagtaataagttttataattactttaatatgattctgtggttaaaaaataagtttgtactatgtacataaagtatttatgaggcagcatattttgtcaaagaataatatttatctagtatatgcatattaccttctattttccccgtctagttttcaagtatatctttttgaactttagtcccctctgtgattgatttttaccccaccttatttcaaagaaattcaaggggactatctcttaacttttttttcctgtttttgttgttgttgttatttgtttttcggaggtgtgtgtgtgtggttgagacaggatctcagtctgttgcccaggctagagtgcagtagtgcagtcatagctcactgtaaccttgaactcctgggctcaagcaatcttcctgccttagtctccttagtagctagtactataggtgcacactgctatgcctggctaattaaaaaaaaaatttttttttaagagatggtgtctcactgtgttgcccaggctaatcttgaactcctggcctcaactgatcctctggcttggcctcccagagtgctgggattatttaaaaaccaggcaccacattcagccttggttttcaaattcttttcaggaagtctttttattaaatacgaaactatatcccaacctcaaatgcattcatacatggggaaaatgtaactttttgaatgtgttgaatttataaatgaataagttctttgttattatttatatcttaagtccttcttaaattagagaccaatacaacttacaaaccgttgctacctatgaaacctttttcaacttttgtgtcttctcaattgtattctgagtaacttccatcttccatcattatcattaatataatactggaaagagtagaatggaaatgatactggcctgagtgtttttaagtttccaaaagatatttggaatcttctgtctgcatttcaacagggccttggcttcgattgcttattttactataaagtgtgtttcacatgtttgccacaatatccttaaatatgctttgctgtttgaccgatgtaaaatcatactccagaaacacctgcatccaagaataactgctgttgaacaatgtgtctaaggctttaatgcaaataccaatcacttggggatcttgctaaaatgtaagttctgattaagcagggttggcatgggcctgaggtcctgcatttctaacaagctcccttgtgatgccactgctcctggtctaggtaccataccttaaggagaaagtatgggttacatctatatgtctagtgcttcctaatgcatttgcccagtgttacaggtctaacttgttcttaggcagtggttctcaaactttagcatgcatgagaatcacttgggagaatgttggctctaaatttacacgcttgggctccactcatcagagtctattttggtgggactttgggacccaggaatttgcacttttgaaaactcctcagattttgatgcatatggactaacaccacaatttgagaaactgatactttaaagtttggaattgctatagaaattcatggtcccttctggaatgacagcttgttaaagccaagcaaggatacagtgaaaagcccatctgaaaggagattgctttgaatgccagtgtagtatttggttaatggggaagcagtagtataaatttgcatgcttttcttttctattccgttgcttcaggcaatataatttactaggtgtattaatttattgtaatataccaatggtgaagaccatagctcattcactccctaattaaccctagaggagtcttaattggataattggttagaaatagtagatgagtaggtatattaaatgttgaatggatggtcagtattgattctactcttggattctgactaggatatttactctctctctctcagaaacatctatatctttaatattacttgctattgtatttactaactgtcacaagaatagcctgttccacatataaaatacagagttggttctcatgttttttgttgaagggaattcggataactagtgagttgtttgtcattttcatttaagacagaagttaaattctaaaagtatgtcactcagtgaatttttaaaaattatatcttttaataactttaagattgattcttcatctattcatgtctctgttttaaggatgtgggtggtatttatataattcctaattgattctataaaaagtattttaaacaaaagggttatatagaggttatagttattagataatcttgtcagaaacagtgccatttagaatacttggttcagcaaactgtttaatgtcagccaaagtgatttaaaagctttatttaggattaatccatcatctgcttaaatttattatctcatttattcactaatttgcatatgactttgcaattcagaaattttaagcaaacagtgatatacccaaaaatggattacaggataaattgaattaaagcaaactgcagtgcaatcaaggccagctctggacagaagcctgggattagtgagctgtgattacatcactccttttctgctcctccgcctttaagagcaagcttctttatgctatccctggatggttttgttccaacccctatgctatgaggtctctcttgcccttggagatttaaagttttgtatcagaaatagatttgaagatcatcatgaccaaatgtagttagtgctatgtgagaaggatatctatcacacaaaatgctttatggtcacagagagattagttctgtctgaagggaaaggggagaagatgacaaacatgccatcggggcaattaacatataacccttccacgggtgagaatactggaccaaatgacctttttggggtgcctttctgttgtgaattttctagtttattaataacccaagaactgtgccttatagtccatagtattcatacctctcaaaaccaaggtacttaggattggggaggaaaaagactctactaatttttaaagtagacctaaacaatttgcactgcctgtgtctttgacctgattttttactctcacctttctttatctgtccagttacctttgtatactaccaaagctttaaccttctgtcctctcaaacttttttaaattttactttatttaactaccaatttatcaaaacagtcatttacacttgacgccagcccactccgaaacagctgctgtctagcttctgctaccagcacttgactatgcttatttgaagatcatcagtgatacactaattaaaactccagtgacttatctggctttgtgttccttcatctatgccacagttgaatcattgaccactttttgcttgaagttctcagctcatgctgctttctgttgagtgcttctcatgctacctcagtggtacttgttaaatgttttccttttctactttccctccatttagtcgcacaaagcccccaccctctatactcgtctctgcctatttaacagatcctacctatgctctaaggcctggttcataggccatcttccctttaaatctttgagctaaaatgttttctcagttctgtagtttttaatctaatttttacttggagcacttttaggatgactgttgccttgatagtatgattttgtacacatttcttaactactctagcagatgttaaaaaaataaaaaaaggagagaaatcatcactgtagcttctgcaatgctgtgcattattagaaatctttaaatatttttcttaatatactgtggtagggagaataatggcaccccaaagatccccatgtcttattctttgagttagtgggtgcagcgcaccagcatggcacatgtatacatatgtaactaacctgcacaatgtgcacatgtaccctaaaacttaaagtataataaaaaataaaaaaaaaaagaaaaaaaaagaaaaaaaaaagaaaccactgaatatgttaggttacagggcaaagtcaaattaagttggaattaaacctgttaatcagttgatcttaaaatgtggagattaatctggattatgctagtgggcctattgtaatcacaaacatctttagaaataaaagagggagtcagaagagagagtcagagtgataccatgtgagatctcatcccttgctttaaagatggaagaaaagaaccatgagcaaggaatgtgggaaacctttaaaaactaggaaaggcaaataaaaggcaagaaaatagatttccccccagagcctccaaaaggaatgcagctgatgtgttgattttagtctagtgagacccatgtcagacttacgacttaccaaattgtaaaataaatactaaaaattcagagacaaagggataagtaaaataggaaaataaaactcattattccaagacttgcttaattccctttagaggtaatttgttcattattacactgttttttggttgttttacaaaggaattctatataatatagttatcccagtgaagaaggagcccagataagatatattgatttattcttctttctttttgtatgttgtaaaacagagtcttgctctgttgcccagactggagtgcagtggcacaatctgggctcactgcagcctctacctcctggctcaagaaatgctcctgccttagcctctaatagctgggaattacaagtgtgccacgtaatttttgtatttttatagagatggggtttcatcatgttgcccaggccggtctcgaactgctgggctcaagcaatcctccctccttggactctcaaagtgccaggattacaggggtgagccaccatgccctcacacaaaaagaaattggttggtacatatacacagctttctgatttctttttatttgagcttcataatttgaaaaagatacctctgttgttcagtggggctgctacatagtagaagctcaataagtattgaatgaatgaaaaaatagaattgataaataaagagaaaatgtctttattcattctaagaaacaaattaccctttagcatttttttaatttttaatttttgtgggtacatggtaggtctatatttatggattacatgagatattttgatatatgcatgcaatatgtaataatcacatcagggaaagtggaggtatccatcacctcaagcatttatcctttatatttcaaacaatataattatatcctttttagttgttttaaaatgtagaatttatttttgttttactatagttaccctgttatgctagcaaatactaggttttactcatactttctatttttgtacccattaaccatccccacttctctcccaccccctgccacaacttcccctctcaacctctggtaaccatccttctactctctatctccctgagtcaattgttttaatttttagctcccacagttaagtgagaacatgcgatgtctgtctttctgtgcctggcttatttcacttaacatagtgacttcacgtttcatccatgttgttgcaaatgacagtatctcattattttttatggctgaatagtacttcattgtggatatgtaccacattttatttattcattcatctgtcgatggacacttaagttgctttcaaatcttggctattttactcctgtaatcccagcactttgggaggctgaggtggtcagaagtttgagaacagcctggccaacatggtgaaacctcgtctctactaaaaatacaaaaattagccaggcattgtggcaggtgcctgtaatcccagctagtcaggagactgaggcaggagaatcactggaattcataaggtggaggttctactgagccatgattgcaccactgcacaccagcctgagtgacaactccatctcaaaaaaaaaaaaaatcttggttattgtaaataatgctgcaataaacatttgagtgcagatatctctttgatattctgatgtcctttcttttgtttatatactcaatagtggaattgctggatcatatggtagctctatttttagttttttgaggagcctccaaactgttctccatagtggttgtactaatttatatttccaccagcagtgtaggaaggttcccttttctccacatcctcgccagcatctgttattgcctgtcatggataaaagccattttaactggggtgaaaagatatctcgtagttttgatttgcatttctctgatgatcagtgatattgattacctttacatatacctgtgtgtcattcgtatgtcatctttggagaaatgtttattcagatgttttcccattttttaataagattgttagatttttcttctatagagttgtttgagaaccttatagattctggttattaatcccttgtcagatgggtcgtttgcagatattttctcccattctgtgggttgttgcttgactttgtacattgtttcctttgctatgcagaagatttttaccttgatgtgatcccatttgtccatgtttgctttggttgcctgtgcttgtgtggtattactcaagaaatttttgcccaggctaatgtccttaaaagtttccccaatattttcttgtagtggttttataatatgagaccttagatttaagtctttaatccattttgatttgatatttgtatatggtgagagatagggttcttctgcatatggataatcagttttcccaacaacatttattgaagagactgtcctttccccaatgtattttctgagcaactttgtcaaaaatgaattcattgtagatgtgtgggtttatttctaggttctctattctgtgccgttttggttatgtagctctgtcatataatttgaagtcagtaatgtgattcttccagttctgttctttttgcttaggataactttggctattctgagtttctgtgctgtcatgtaaatttcaggattgttttccctatttctgtgaagaatatctttggtattttgatagggattgcactgaatctgttgattgctttgtgtaatatggacattttaacaagattgagtcttccgatacacggacatgaaatatctatccatttgtgtgtgtgtgtgctctttaatttctttcaaaagtgtttcatagttttcattgtagagatcatttacttctttgattaattcctaggtatttaattttatttgcagctattgtaaataggattactttttaaatttctttttcagattgtttactgttataaaaatggtttttgtatgttgattttgtgtgctacaactttattgaatttgtttatcagttctaatagttttttggtggagtctttagttttttcaaatgtaagattatatcatttgcaaacaaggataatttgactgcttcctttccgatttgatgctctttatatccttctcttttctgactgctctagctagaactttcagtactatgttgaataacagtggtgacagtggacattcttgtcatgttctagatcttagaggaaaggctttcagtttttcccagttcagtataatactagttgttggtctgttgtatgtggtttttattatgttgaggtatgttccctctatccccagtttttggagggtttttaccatgaagggatgtggaattttgtgaaatgctttttcagcttcaatggaaatgattatatggtttgtgtcctttattctgttgatgtgatgtatcacatttattgatttgcatatgttgaatcatccttgcattccagggataaatcctacttggccatgatgaatgatctttctaatgtgttgttgaatttggtctgctagtgctttgctgaggatttttgcatcaatattcatcaatgatattggcctgtaatttccttttttgatgtgtctttgtctgattttggtataagggtaatactggccttgtagagtgagtttgtaaggattccttcctcctttatttttctaaatagtttgattcagattgatattatttcttctttaaatgtttggtagaaatcagcagcgaagccatcaggtcctggacttttctttgctgggaaacattacagctttggtattgttgtttgttattggtctgttcaggtttttggtttcttccttgttcactcttggtaggttggctatatctaggaatttatacatttcttccagatttcctaatttattgaaattatgtttgctcatagtagccactgttgatcccttgaacatctacagcatcagttgtaatatctcctttttcacctctgattctatttatttggttcttttttcttttttttttttttttgtctggctaaatgtttgtcaattttgtttaacttttaaaaaaacaattttttgtttcattgatcttttattctgttttcttcatttcagtttcatttatttctgctctgatcttttttttttttttagacggagtctcactctgttgcccaggctggagtgcagtggcgtgatctcggctcactgcaagttccacctcctgggttcgtgccattctcctgcctcagcctcccgagtagctgggactacatgcacccgccaccacacccagctaatttttcgtatttttagtagagacacggtttcactgtgttcaccaggatggtctcgatcccctgacctcgtgatctgcccgcctcggcctcccaaagtgctgggattacagacatgagctaccgcgcccggcctctgctctgatctttattacatcttttcttctaattttgagtttggtttactcttggttttctagttctttaagatacagtgttaggttgtttatatgaagtttttcttcttttttgatgtaagctcttatgtctataaactttcctctcagtgctgtatcctgtaggttttggtatgttatatttttattatcttttttacaagatatttttcaatttccttcttgatttccttattgactcactcatcattcagaaacatattgtttaatttcatgtatttatatagtattcaaaattccttgttactaatttctagttttattccattgtggttagacacttgatattttttcagttctttttaatgttttaagacttattttgtgacttaacatatgatctgtccttgaaattgatccatgtgctgaggaaaagaaggtgtattcttcaactgttgaatgaaatgttctgtaaatatctagtaggttcatttgttctatagtgcagatttaactgatgtttccttgttgattttctgtctggaagatctgtgtaatgctgaaagtggggtgttgaagtctccagctgttactctattggggtttattagagctactctttagctctaataatatttgctttatatatctgagttttccagtgttgggtccatagatacttaaaattgttatatccttttgcagaactgacccttttatcattatatagtgaccttctttgtctcttcttatagttttgtcttgaaatctattttgtctattagaactataactactcctacttttttggtttccattgggatggaatatctttttccattcctttggttttagtctacatatgtctttttaggtaaagtgtttttcttgtaggcaacagatcattgagtcttgtttctttatccattcagccactttgtgtctttttattgtagagtttagttcatttacattcaatgttattattggtaattaaagacttactactgcctatttggttttggttgtttcgtggtcttcttatccctctttccttccttcctgtcttccttttggttaaggtgattttctctgttggtatgatttaatttcttgctttttatttttttgtgtatctgttgtatgttttctgatttgaggttaccgtgagacttgcaagtaatatcttataacccattattttaagctataacaacttcacactgtttgtataaacaagcaaaaagaaaactgagtgaaaactctacatgttaacttcatcccccagatagttaatcttttgttgcttctatttatatcttattatactgcctgatttcaaaaattgtagtagttactattttctgttggctcatattttaatctttctatttaatataagagaagtttatataccacagttacagttttataatattctgtggggtttttttctgtgtatttactgttactagtgagtttgtactttcagtttatttcttattgctcattaatgtccttttctttctgattgaactactctctttagcacttcttgtagaacagatctagtgtttaaggcctttggcttttgtttctttgagaaagtctgtatttctccctcatgtttgaaggatattttcaccaggtatactattccaggataaaagttttttttttttctttagcagtttacatatgtcatgccactgtctcctggcccataaggtttccacttagcttactgtctgacttagagctccattgtatgttatttgtttctcttctcttgctgcttttaggatactttttttatccttaacctttgggagtttaactattaaatgttttgaagtagtcctctttgggttaaatctgcttggtgttctattagcttcttgtacttggattttgatagcattctctaggtttgtgaaattctttgctattatctctttggataaactttctaaccttatctcattctctacatttttttaaggccaataactcttagctttgcttttttgaggctactctgtaaatcttctaggtgtgcttcatttttttttctattatgtcctctgagtgtgtattttcaaatagtttgtcttttttgtctatttttattattatattttaagttctagggtacatgtgcacaacatgcaggttagttacatatgtatacatgtgccatgttaatgtgctgcacccattaactcatcatttacattaggtatttctcctaatgctatccctcccccctccccccaccccacaacaggtcccagtgtgtgatgttccccaccctgtgttgccaagtgttctcattgttcacttcccacctatgagtgagaacatgcggtgtttggttttctgtccttgcaatagtttgctcagaatgatggtttctagcttcatccatgtcgctacaaaggacatgattccattcaggacataggcatgggcaaggacttcatgactaaaacaccaaaaacaatggcaacaaaagccaaaatagacaaatgggatctaattaaactaaagagcttctgcacaataaaagaagctaccatcagagtgaacaggcaacctacagaatgggagaaaatttttgcaatctacccatctgacaaagggctaatatccagaatctacaaagaacttaaacaaatttacaagaaaaaatcaaacaaccccatcaaaaagtggacgaaggatatgaacagacacttctcaaaagaagacatttatgcagccaacagacatatgaaaaaatgctcatcatcactggccatcagagaaatgcaaatcaaaaccacaatgagataccatctcacaccagttagaatggcgatcattaaaaagtcaggaaacaacaggtgctggagaggatgtggagaaataggaacacttttatatggttggtgggactgtaaactagttcaaccattgtggaagacagtgtggcgattcctcaaggatctagaactagaaatagcatttgacccagccatcccattactgggtatatacccaaaggattataaatcatgctgctatcaagacacgtgcacacgtatgtttattgcgccactattcacaatagcaaagacttggaaccaacccaaatgtccatcaatgatagactggactaagaaaaatgtgacatatttacactatggagtactatacaaatagtttatcttaaaggtcactaattctttcttctgcttgatcaactgtatttttcaaatccagaatttctgctttattctttttaattatttcaatctctttgttcagttcatgtgatagaattttgaattccttctctgagttatcttgaatttctttgtgttttctcaaaacaggtattttgaattctctgtctgaaaggtaccatgtgtctctttctccaagagtggtccctggtgccctatttagtttgtttggtgaggtcatgctttcctggattatgttgatggttgtagatattctttggtgtctggacattgaagggttaggtatttattgtagtcttctcattctgggcttatttgtaacggtctttcttgggaaggctttccaggaattctcaagtacttgggtgttgtgatctaagcactgcctgcatgaaggggcaccccaagcccggtaacactgtggttcttacagactcataagatgccgccttcgtggtcttagataagatctggaagagttctgtggattaccaggcagagacacttgttctcttcccttgctttcttccaaaccaacagagttctctctatgttgagctgcctggagctgtgggttgatacaagtgcccctgtggttaccaccactgggattgcactgggtcagacctggagccagcatagcattttgtctcactcaaggcccagtataaccactaccaggttatcgcctatgttctctgaaggccctagggctctacaatcagcaggtagcaatgccagaaagtcttgtgtttttcctttcagggtagtgagttcccttaggcccaaatgggtctagagtagctgtccaggtgctagggactagaatgaaaaccttctaaatctacctgatgttccattgtactgtgcctgagcctaagccacgagtcacggtttttcccgttcttccctcctctttccacaagcagaggagcctcagcccacggccatcaccaacacaggcccatggggagtactgccaggcttccaccaatgttcatttaaagcccaagtgctctttagtcagcttatggtgaatgttgcctgacctaggactcacccttcagggtggtgggctcccctctggcccatggcagactcagaaatgccatctaaaagccaaggcctggaatcggggaccccaagaacctgcctcatgctctatctccctgtggcctagctggtacctaagatgcaagacaaagtcctgtttactttttcctctgctttcttcgagtagatggagtctgtcatcatagctaccacagctgggaaagtgctgtgtctcacctgaagccaacatgtctcagagtctcacccaaaacccatggcatactccatgagtattgcattggttattcagggccaaagggttctttagtccacaggtgatgggatctgccatgactgggtacttcctttcaagtcaatgcgttcccttctggctgagggagtttctcaaaatactttctgggagctaaggcctgaaatgggggtctcacaacattgtctggtaccctatcctactgtggctgagctggtatccaagatgcaagttaaaatcctctttactcttccctttcctctcctcaagcagaagcaaggggtcccttttggagccacaaggggtctcttttgcagcctggagctggaggagggtggtgcaagcactgtattaaccattgtgtctggtgtctcagtaagttacatgtccccccagtccactggctctgacaccagcccagcacaaggactcacctacgacttagagtccttatggcctagattgcctttcaagtttatttaggtgcccagagcactccatcctgcagtggcaaggcttgctggaactcagattttgactgctcagatgggtgattcccatctggctagagccagtccatatgctccttccatgagtggctgtcagctaagtacagcctggttctgcttttgctatgacaggacagcactgaattaagtgcagcgtgtcacaatcactgcattctttctccccagatgcacagattcttcttgccatgcagccactgctgggggatgagggaatgattgtgttggcagttcaagactttttcctgccctattcaatgcctctttctgtaatattcagttaaaaccaggtagtgtgaatgcttacctgatttttggttcttagaaggtgcttttttggtgtagttaataaatttggtattcctcttgggaagacaatcagtgtagctttctattccgccatcttgctccaccctctatgtcgaattactttttttttttttttttttttgagacaaaatttcactcttattgctcagactggagtacagtggcataaccttggctcactgcaacctccgcctcccaggttcaagtgattctcctgcctcaacctcccgagtagctgggattacaggtgcatgccaccacgcctgactaattttttttttttttttttgagatggagtctcgctcttgtcgcccaggctggagtgcagtggcacgatcttggctcactgcaacctctgcctcgcagattcaagcgattctccatctaagcctcctgagtagctaggtttacaggcacatgccaccactctcggctagttcttttgtaattttagtagagacggggtttcactgtgttagccaggctggtctcgaactcctgacctcaggcgatccgcctgcctcagcctcccaaagtgctaggattacaggcatgagccaccgtgcctggtctacttttaattcttcaaatgcactgtattcttatctccacccaccctgcctcaactgtactgtccctattcctcctctcttacacaaataatacttccattacatgaaggctttgttctccttccctttgaataagtcctacggattttaaaaattttgatttaaatcttaagccttttgtgaagggtttcttccttcatcactcactgcctttccttcccctcttccatatgtataagcaggtatactcactttttgtttccatagcaccttgtacttccaccgtagccttaatacattgcagcattattgtccatttaattatctttttcattaggctttaagctccatgaggttagggactatgtctctttttcatcattgttgcattcccaggcttggcataatgtatattttaataaatatttagaccaggcacagtgactcacacctgtaatctcgcactttggaggctgaggcaggaggcttgccttagcccaagagtttgagaccagtctaggtaacatactagatcctgtcactgcaaaaagttaaacaaaattttagccaggtgtgttggtacatgcctgtagtcctagctacttgggagactgaggtggggaggtgcttgagcttaggagtttgaggctgcagtgagctagaatcacactactgtacttcagcctgggcaacagagcagagaaaaatatataagaaaatttatatctagaataacactcatgaaatttactagtaatctcagatgtgtccaaaataatactctcagtctaggtagatatgaatattgtttttaggttgtttattagctcatttgttgaagttcatagccctacccaatattaaagttgatgataattttataggcttggccagatgtggtggttcatgcgtgtaatcctagcactttgggaggctgaggtgggtggattgcttgagtccaggagttcaagaccagcctgggcaacatggcaaaactttgtctctactgaaaatacgaaaaatcagcctggcatggtggtgtgcacctgtagtttcagctacttgggaggctgaggtgggagaatcacctgactccgtgaggttgaggctgcagtgagccgagatcatgtcagtgcacttcagcctgggaaatgggagtgagaccctgtctgaaaaaaaaaaaaaaaaaaaagtataggcagaatgtaacctcctgtaacagcaaaatctacttttaagtaaggtatttgaggtttatccagagttcaaagttgacatcttgacattgtttcacatttatatttgaacttaaatactttttggcagttgccatttttcagttagatggtatttttcaaacaaataattttattttttctgactttccttctttggagcctagtaattttgggagtatatatttagaacatcgtgtatagttttttaagaaagaaaatggcattgatctatttcttttgaaaataatactctgttggtggtttggaaaggtttatgtagaggtaaatgggtttatgtctgttgatgggctcctgcagataaagccacagacatcttcagccatgctgcttttgtgttgatgttctgtttttcccttgggacaataggtgctgttccttgtaaaaatatgataggaaaggaaatttgttctgttttgctgctatttaaagcaccacagacctgctcagtagactttgacactctattcatctcatcctccgttgaattattgttgttgttttattagggaaaagttttccttggagataattcctacaaagtaattataatttacaaagttttcttggttttccatgtgaaatgaaattatttctggagatttgggcctatgaatatctggtttcagagtcttaatcattaattgttttgcctcctatttagatgattaaagttaaagctaatttattttctctgttttcattactaacgtaaaatttttaggtggccagtagaaagaattcctaacagccaaaatctctggtcttttagaatgtcattttaaaccacttttctctcatcttcttatacatatttgctccgactctacctttcactgtgggtttcatttaccctggaacctaggttactaggggctgcaggaagtacctggtgcagggaatactagtacccattctttcatagccaggaaaaaggggagagggtgttggaatatacacaaacaagtcaaagttggggagacttgagtgcatcaagtcgataagtctttgccaagtcctgcctactgagggatgctcagtttctacagggcagggaagacacctttggtaagaaaataatttaccttctagcattgacccccttatcaatcccttatcctcctttagaagaattgaattgcctgtggttagcttctaacttccccaaagcatgtagtactctgcagcctgggttgtaaggcttataatgagtgtttgccctagtctggggattctttttaccataagtggtgtgtctgatggaaactgcctccctctggaagatatatatcatgaactctcattgtttcagtgtaacttctagtctcacaaattcatggagtgaaagtcagagagtgaaatttagcttagtttctatggggatgtgagtaatctttagggattattaaaacaatatactttttttccccccaagttttcccttgctcctctttttctagctcttcccccattcacctatggaatcatctgcattcattatttcaggagagaggtagatacagtctaaaatgtaggagtaattgctcagctctgagacttacattttataaaaataaattcttatcttaatgtaaaatacttcttcaggaacaaaattcaaaagatccaaaaggatctaattgtacataaatctcctccttctttctccccaacccaccagcattctttctctttgtcattcagttctgtatacacaaacagtacatagtttacactcttgtacaccttgcttttttcaagtaatacctttgctatagttctagattggtacatattaaactacctcattctttttaattagttatagtaatcatatcttactggtagatattacttcagttcctcatcttatgctttcacaaatgatgctgcggtgaaaatccctagccacacatcattttgcacacatatgagtttatcgataggataaattcccaggagtagaattactaggtcaaagacttattttattttttagagatgagatcttgctgtgttacccaggttgctctcgaaccctggacacaagcatttctcctgcctcagcctgccagtgtgctgggattacagatgtaagccaccacatccagccaagactaatatttttaactttgagtttaaatttttttttctatgtcaaactgtagacatgaaagtttagggttttttcctgaaacaaatgaagattttctaaattctagaaatttcacaatatgtattaacaaaatttgaaaatctgtacataattccactatactctatggtgtagaaaggactgaagatgatacatggacaatttttgccacattagaaggaaaatcctttccagtgttgagaagaagagccgtaggtcagtgtctttattcccctgtataccttttcaggagctgaacttcaaaagtaggaaacagggaggtattgacagtgatagtgatagtaatagtgaaaacagtcagttaggttctggagagaatctgagaacagcaagattgtctgagaaagacgaccctctaagggatagagaacttctaagagcactggtagactggccaaagcctataaacagagcatggaggctgcagaatacttggaccttaaaaccagaagatacagcaaaatttgagggcatcagtagtggttgccaagaagaccagccaaatctcagtgaacacaacaagcacaggatatttagtgaccaggtcaagtgataaatatctcaattgaaggcaaccaattgcctgacctacagcaagtgaactagcacgcgtgtcctctccaccatgaccatgaaacaactcagcttcctccttgtacctagttgccatcccaggaatgaagagagagtagagagattccttaaagaagttggactttttatggaaagattgtttgcctgaaagagactgctttaaactaggagaccaagttatgtttagttggtaaatttgtgacaactgcccatcctacccacacccatcactattagagaaaatcgatgctgcagagaaaaatgatataaaatgtagaaatgaaattatatatttcttgaatgtctcagtcattgtgtataaattttatcacccttctccagcatacacacacatgtgcacacactactggggagtatctctctaggttcttctaccacatgtaaggcatacccaagggtaaatcatatggcaacatacacaagtttctatattttttctattagctttaatattaatagaattttgtgtgagtatatagcaacttctggttgcctgtagctatctttactgaaatattccatcatatcttcaccatatcacattaacttaaataggatctcttttccttttatcaagtatagtaatagctaacattagtgagtgtttattatgtatccagcactgtgcccatatgtaatactttgcaaggatcaatgtgctgtatatgaggaaactgcaagttaaggaacttccatgtatactttgaagttcattctcttaaataaggaagctatattgccttccactgccttgcatttttgttttcagccctgtccttcaaaaccttactgtgtttgtgtaaattctgtcttcccatgttccttctcccccactcccttgtcccatttggttttctggtccttctctgttgcatgaattctatttccctccttttattgcctgaggtctttctggcacactgattctctgagcctgttcttatgctcctctttccctcccactctttgcccttttgtcattggcagcttcttacagattcccttgctgtttttattttctctctctcagtccaacaaagactgcttataaagagcagtgaccttgtcatttgaacaaaagattccaagaaccctgtgtaggttggttattgatttgcttaactgaagaaactgattagctacttcatctgttgttgagtatctctattaatgtcagggagttacatgttacagtattagtagctctgacagtgactgtcttcaaattaattttactgactgattttatctcagagttcttatctatagagtgatcactataatacctcccaaaaggaaagataaaatccctgaaagtgcattaccttagaggcttattttaaaacaagttttatttttttatttcacatttttaaagttccaaattatgcttggaaaagataatatcatttaggcctttaagttttttttagctttgaattcactgatatgtatttttcatttagatttgaaatatgataattgagaagagtatattcaacaaaagaagagtgaagtaatatatgaatgtatatgtaaacctaactacatatatttatagaaatatgcatatgcttccataaatattaaccatacgtgattatgtttgtaatattcacatattgcttaggaatgctaattaattaaaaggtcttgttgaattcaaattggttttacaagcttcattttaatgatttgttattattactgtgcgactttgaaaaaccaggtctattgaacttatggatatgggaaatacatatatttaaactgaaacaaaacgttattttatttttattttttattttttatttttttgagagagttttgctttgttgcccaggctggagtgcagtggtatgcgatctcggctcactgaaacctctgcctcctgggttcagataattctcctgcctcagcttcctgagtaggtgggattacaggcgcatgccaccacgcccggctaaattttttttttttttttttgtatttttagtaaagatggggtttcaccctattggccaggctggtcttgaactcgcgacctcaagtgacctaccaacctcggcctcccaaagtgctaggattacaggtgtgagccaccgcgcctggcctgaaacaaaattttaattgtgactttttagcattactttctcctcaaaaagccaagaattgactctttgatatgttatctagtgaaataaatttgatattattttctttgatttctgtagagaatttttgtttatagtttaaattccttttggataacattaggaattattttaataagtagagtaggttttctaattattagtaagttgtaattatttaccccctcattttttttcaatcttacaaaaggccaaaatatcacaatgaacatatccagtagaactggggggaaaattaaaaatgagtttctttatgcaaaattgctaccacatataatgcattatgatatggggagtggcttacagttcatatattcttatagtttatatattcttgattaaatcttttacagaacttagaaatttaagttaaaaacacttaaattaaaaaaatttaagttattttatgtggattaattttaaaattaatagcatagtagaaagatgattgtaatcttcaaagattttcaaattagtgtataccgttcatatgacttagaacatttaggaaaactacaggtatattttggcatagaaaataacaaaatgtggattattgtttttacttttttgttggatttcaatttgatgtttacaagtattgaggttattttatatagtattggaaagcttggatacctagaaacatggattcttagtggtgggttttggcatcaaacacacattggcctgagtcagagcttcatccatttcaagcaatgttaccttgggctaccattccgagcctcagtttccttggttatgaaatgggagtgatggcaattatctcaacgaattattgtgaagatgaaatgataagatgtttagcgcagtgcctggcacttattgagggttggtaaatggtagttgttgctaattgtagcaatgacaacagttctagtgttgtatagtgtgagaaaataaaatcaaatctgaaacatatatcacatcactttcatagctttctctctctgttttcaatttctgttcctgggactctcttttaagttcatatattataatgttattaattttagaccctaataacttctaaactgtttagagtcatagttatgtaatcataaacttttagagctgaagggaatttggggatcatttagtccaaacctcttattttacaagaaagaaaattatgtttggagtagtgaagtgatttacccagtataaattacttgtggcaggcttcttcttttttttttttttttgagatggagttttgctcttgtagcccaggctagactgcaatgatgcgatctcaactcactgcaacctccgcctcccgggttcaagcgattctcctgcctcagctttcagagtagctgagattacaggcgcacaccactacgcccagctaatttttgtatttttagtagagacagggttttaccacattggccagggtggtctcaaacttctgacctcaggtaatccacccttctcggcctcccaaagtgctggcattacaggtgtgagccactgagctcagccggtgggtttcttataagtggaacgctgttcattgtaccacatactggccccctcaatgtatcattcatttaaagtgtgaggctctgttagtttgatttgttcacttgagaccctgttatgcactgggtactgtgcatgaaatgagaactataaagttcctaccctgcagatattcatagtgaaaggaactgattgacaatcacagtagtgtgataagtattatagaagtagggtatagtaaatacagttaaacgaaaacaaagggataggaaccgtagtttattaagtgtctatatgacaagtaactcccatacactcatttaatgccataaccttctgatatagatattattatccataatttcttatttcatagcaaagctcagctcctgattgagaaggaaggaaggaggcatggtatccctgagttccagtaaaaaactcagtgctcatgaggacatgggccttctataaaagatttggtagatattggttgataattaaatgggagtgatgaatcattgagactgtctttttacctgccgctgacattaaagaccaagttgctttttttgtcatttgttttttacaaattcattgccttaattgagtagaagaaactaaacattttctaatttcttaagagaataaccttagtgatctaaactgaggaataagcatttcctgttgtaaatgtacttctctcagttctcttagtatttctggagtcaaaaatctagggcaaggccaaaagcttgggaaagacacagaatcttccatgccctctgagaccctacattttctaaacttaacttgattttctcactttgtttactctttttttttttttttgagatggagtctcactctatcgcccaggctagagtgcactggggccatcacggctcactgcaacctctgcctcccgggttcaagcgattctgctgcctcagtctcctgagtagctgggactacaggcgacctccttaagcagagagggggtttcaccatgttggccaggctggtcttgcactcctgacctaaagtgatccatgtgcctcggcctcccaaagtgctgggattacaggcatgagccaccgtgcctggcctcactttgtttacttttattacttgcttttctcctgctatgccttcgtaaaatctcttagttgcatcactgatgggcatttaaggcattgtgagaagatttagttgttcagtgacagtagtaagttgtcatttttattgctggcttaaaaaataatttttggaagagctgccatgtactaacagtccattgcataacactttactttttgtttttttaaagagatagtatctttttattaacatttttttaaaaatccataacttagtaggtgttagtgtttctaaaacacttgattgctcttggttccaaataggttttcagtggggaaaaaaatacccatttagagaatatttgatatggcatatatgctctctttctaggggaaaatatccttctgggattcttaggatacctgtttttttttttgactttcagttttataaatagagctgacctaggtttacgggtttctttcatttctaaaattctgctgttttactagaactactattatctttggaaactcttaattaaaagaaagaaaaatatataatattaggcagaaaccatgaaaattataaatagaaaattatattaattataatatgcatcagaatttggtgctctttatagttactgaaatgtatataaaaataaatttgctaacatagtgaactttttataagcaacaagtatgcaaaaagttcattaattattataagcagctagaatgccaggcagaatattagcaaccaaatttatattacataggcaataattgacagattcgtctctggagaaactgactattccaaaggaaaagaatcccaaagagctggccaggtcactactccactgacaatgaggcacacccttgaacaaaccccactgaagtccacagagcttctgatcacatttttagttcttttagttctttagtatttaatatataaaatagtctagaattactagattttcaaggaatacctttattgtgaatgaaaaccaaataacacaaaacagaaaaaaaggaaactcaggaaacaactcaagagaaacagagataatgcagaagaaagtacacggtatatatatatatatatatatgtacatatatgtgtgtatatatatgtacatatatatgtgtgtatatatatgtacatatatatgtgtgtgtgtatatatacatatatgtgtgtgtatatatacatatatgtgcatatatatacacacacacacatatatatatttatattccagaatattccagaaattctttcagagaatatgagatgaattagtgaaacttttcaaatgcaaaaatgacacagttactaactctaggaaaaaccaagcttgaacaagaatacataattatagaacattatatggcctaactgtgaataacagatatgtggttataagacaataaatagtgattaacctaaattggagatataatgatattagggtaatagatgtagtagaagagagtgtgtgtatgtgtgttcattcatgtgcttgtgcatacatacatatgtgagtgcagacatgaccatgggcatatgtgttggtgggtgggtaagtgctgtattctcatcttccatgttgcgaagtcagtagataaggggtttgcaaactatgacctggagtccaaatccagctgcccactgttacttcaaaataaagtttcattggaacacagctactcctgtttatttacatattgtctacagctgctctggtgccactatggcagagatgaattgtcaagaaagaatccatatggcccacaaagcctaagatatttactatctggctacacaataattaaaacaaattttaaaaatcaggaaatagcagttcatcatttagaaatatacatgtaaggcccagcatgatggctcatgcctgtaatcccagcactttgggaggtcaaggtgggtggaccatgaggtgaggagatcaagaccatcttggctaacacagtgaaaccccatctctactaaaaatacaaaaaattagccagatgtggtgatgggctcctgtagtcccagctactggggaggctgaggcaggagaattgcctgaactcgggaggcggaggttgctctgagccgagattgcaccactgcactccagcctgggcaacagagcgagactccgtcaaaaaaaaaaaaaaaaagaaatgtaaatacaaaaaaaatcagttgtgttctatgcagtaataaggaactatctaaacaagaaatgaagaaaacaattccatttacaatagctacaaaaaaattactcaggaataaattttaccaaggagatgaaagacctctacactgaaaactataaagtattgatgaaataaattgaagaggacacaaacaaatgggaatatatcctgtgttcatagattagaagaattaatattgttaaaatgtccatactacctaaaacaatctacagattcaatagactcttttttttttcttttctttttttttttgtgacaaggtctggctctgttacttaggctggagtgcagtggtgtaatctcggctcaccacaaacgccgccttcagagctcaagccatcctctcaacttagcctcctgagtagctgggactacaggtatcagccaccatgcctggctaatttttgtgttttttgtagagttagggtttcgccatgttgcccaggcttgtctccaactcttgagctcaagtgatgtgcccaccttggcctcccaaagtgctaggattacaggcatgagccagcacgcctggccagactcaacaccctttatcaaaattccaataacttttttcacagaaatagaaaaaataaccctaaaacttgttttaggattgtttaaatcttatttgtttaaatcctgtttagaccctgaatagccaaagcaaacttgagggaaaaaaaaaaaaccaaacaaataaaaacaaagctggaagcataacacaacctgacttcaaaatacaatacacaggtataataaccaaaacggcatggtactggcacaaaaacagaaccatagaccaataaaacagaagagagggcccagaagtaaatacatttatagtcaattgatttttgacaactatgccaagaacacacaagatggaaaagacagtctcttcaataaatggtcctaggaaaactggatatccatgtgcagaataatgaaattagagcctcatttcataccatatacaaaaattcaagtcaaaatgaagacttaaatgtaaaacctgaaactgtaaaactactagaagacagtgtaggggaaaagctccatgacattggtctgggcaatgatgttttagatataattccaaaagcacaagcaacagaagcaaaggtagacaaatagaattgaatcaaatgaaaaagcttctgcacagcaaaagaaacaacagggtgaggagtcatcctacagaatgggtgcaaatatttgccaaccatacatctgataaggggttaatatccaaaatatataaggaatcaattcaattgtaagaaaacaacctgatttaaaaatgggcaaaatacctgaatagacacttctcaaaagaagacataaaaatggccagcaggtatataaaaaaatgttcagtgctataagaggaatttgcatatctttacagatttggcagtgatcaaagcaaaagtctgggaaagctctacaagcagaattctcctttgactccttgaggagccttacctttcagattgagaaaagctataatatgatttaaaatccatctggcatttgctgttagattgtgatttttggtaacagcagacagtgtcaggttttattttattttcctagaatcagggtagtcaagaatatttcgtttactctagccagttctttttcacattttggcccaaactttattcccaaaacattatatcggtacatattttaaaatctagcaaacacatgggcatttgtgaagaccttttttttttttgtacaaaatgtgttctgaatttttgcttgtactgaaaaatacttgaaataaacacaggaagttgtatactaaaaaatgctgaacatcactaatcatcaggaaaatgcaaatcaaaaccaaaatgtcacttcacacctgttagaatgactgttagcaaaaagacaaaagataagtgtcaatgaggatgtggagaaaagggaacccttgcacgctgttggtgggaatataaattggtacaaccattatggaaaacagcatggatgttcctaaaaaaattaaaaatagaaccaccataggatccagtaatcccaataatgggtatatatccaaaggaaatgtaatcagtatgtcaaagagatattttcattcccatgttcattgcagtattaatcacaatagccaggatatgtcatcaacctgagtccatcagtggatgaatggaaaaagaaaatgtgaatacataatggaataccatccagcctttaaaaagttagaaattctgtcatatacataaacatgaatgaacctggaagatgttatattctgtgaaataaactaggcacagaaagtcaaataccacatgatctcttacgtgcaatctaaaaaagttgaactcatagaaacaaagtaaaatgctaactaccagaggctggaggctggaggattgggaagatgttggtcaagggacacaaaaatttcacttttataggaggaataagttcaagagatctattgtatatcatggtaattatacttaatgataatatattgtatacttgaacattgctaagtgtatatttgatatttacatattgtctatagccactctggtgctaccatggcagagataaatagtcagaaagaggttatacggcccacaaagcctaagatatttactgtctggccctttacagaaaacaaccttgtgatacacaataattaaaacaaatttaaaaaatcaggaaatggcagtacgtcatttagaaatatatatgtaaatacaaaaatcagttgtgtttctgtgcagtaacaaggaactgtttgacaagaaatgaagaaaacgattccatttacaatagctacaaaaaataggaataaatttaagcaaggaagtgaaagatctctatacaacaaaaaaatgataagtatattaggtaatgcgtgtgttaaatagcttgatttatccaccttacagtgtatgcatatatcaaaacatcatgttgtctacgcattgggtaaagtgtacactgcttgggttatgggtgcaccaaaatctctgaaatcactgctaaagaacttaattcatataaccaaaaaccacctgttccccaaaaactattgaaataatagtaataaaaaaaactcacacctgtaatcctagcactttgaaaggccaatgtggttggattgcttgagctcagaagttcgagtccaccctgggcaacatggcgaaacctcatctctacaaaaaaaatacaaaaattagctggatgtggaggcgcgtgcctgtggtcccagctacttggggggctgaggcgggaggatcccttgagcctgggaggcggaaacttaccttatacaccataattttaatttttacttgtcaatttaaaaagaatttaaggaacaatgtttgaaaatatgagaagaaatagcttaataaattgacaatgttcacctaaaatgagtaagagtctgaagtgcagaggaatgggacagaatactgctgcttttcatttaagcctaatagtatagtactgttttaaaaccatatacatgtattgctttaatacaatttttaaaaattaaatttagaaaattaagaaaaggtagctgttagaattaggcttgttggtgtagggttgccatgttacactgatgcataattcaccaaatactgtatttaaaaataaagtatcagagataccatggaaaaataaacatatgttaaaaaaataccagtaccttcaaacaccctattccctatagtatcaattttttattatatgctttttgatataactgtaataggtaattgatgcaaataacctccatctcttattttagtattattagtggtttcaaaacttcatatagcaacttctttttaccatagctgctaatgagaagcaaaaaagaaaaaaaatcaaaccaaagaaaattgatttactatcttgtcacactcttttggtgatggtaataaaccagaggagaaaaaaattaaaggagtagtgaattggctcaaagtgaatcagacaagtacttctgagggtcaatgaaccctaaaacctgatggtagataataaaatattgctgaattttgatttactattaagtatctttaatgtactgtgttttatattcaccaaacagagttatcttttcatataatgcaagatttttaaatgtaaaaaccatggtttatttcgttttgtattctctacagggtagtgtttggactcagtaggtgcccagtaaaggcatgctttaatatgaatggattttcactactgagtagcttgttctggttgattttcaaaagagtcttaaatttgtaagtgaataaaaaattatatgagtattatgagtgttcaaacaaatggaagcatttcttttccctgatttcgcataatgtgtatgatttgtgctaagtgataataaagacccttccgtttttcactcttggaagagaaacccttatcttctctacaaacaatttcaggttgttgttgctgtaaaacaagccctgagacctgttatcgactcattgttattttttctattttccaccatcctgtgagagaacatctttttaatgtggttttatacagtcttcagtgtgtctcagatatgggtttagtaaatctgttaagtacttttgtttgtcttctgttttttctctgaacaatacagttatgcaatttcctttgttattaaatgtcaggattattttcttatttatcaaccctgtagttttcaatcatttctgccatgttctttttggaagactgttgattgctttttagctaaatggtaccacagccagagaaaaagtggctaagatctgatgacatttgatgaattggtatgtcatttgcaattgtgtattctacccagttccctatttgagagaggtgttttctcctggaagtgctagagaaattgttatagcataattccttagaaaaattattcatagtaatgtatccgtgagacacatctagaccagggatatctcatggaaatgattgtcctttctgaacaagtgccacatgtttttatttgtaaacttattttcttctcatcctggaaataatgatattaaaaacattgtgtgactagtgatctatgactctgatatacaaacaatgcctattttattgtttctgtataataagcaagtcctgttgtgttcatttagctagaaatgaaaaaaaacccagcacacctgcattttgcatttaattaatttatggtggtgtagtattataccgtcttttaaaaactactggcaaattttaaatgtgcagtgcactatataaataggaatgagaagagtctattcatggcaaggtaattagagcatctttggctagaatatctctgagtaaaaatagctagtctcaatgttggagtaaggtaattaagtcctgaagaataatgatgaaaaccttttgctcagataccctttcttcatttaagttcaatgccgtacattcaaataaaatctgtgtaatcaaactagcccattaagtactactgagtgagataaattgtaatacctattctatatccttgcaaaagggaaatgcatgttatctagaaacataacagcttataaattaaaaacattcatttttcttctcttttgtcttatatcaactttttgtatatttatatacataatcacctaactcctacctcctcttctttcttccttcttcctcaggtaatgtacaataatacattatagtaaccaaaatcgagattgctggattttttttatgttcttagctctctgacaaagagagcttgcttgccctttttccccccaaatcttaaatataggcatctttcaatgagttgtctcagtcccattttttccccctgtaatccatgccttggtaaacctttattcctaccacaacactttatgcagtgattcccaaacatatattcctggtcaagtctcttggactccaaaattgtatttccagctgttgcctggatttctatatttgaaatgtaatgacatcttaaactaaatgacttcaaagtcaagaatcattctctagtccatctaatcatcccacctcctcttcacacagccttcactacctcagttcatgacaccatcagtcacttttgaacaacttgccgcattttacacatccaactaaagtcatgtccgttctacttatgtaacatcatcaaattcatctccttcattctgttctcattgcccttgctgaggttgaggcccacatgtcctcttgccaggagtatagcagttgctcttgatcttcacgtgctgcttcaccagtccattctacccacagttcatagatgtgctttcttaagaactggactggtaatgccattactctaaaaacttccactggaccttcgctgcctcttaatctaagaccagaatttttagcttcatttgcaaggcctgtcccagtttagctctttagcctccttttgcatatatgccatactctagaaaaatggaatggatttttccccctcagatacgttatgttattttccatccatatgtcttttcataatacgtaaccttcatgagggcaatgattttcttttaatctgttttgtttactgttttatccgtagcaagtaaaacctatatgtcacacgtagcaggtactcagtaaatatttgctgaatgaataggtaagtaaatggatagaagaagaattggaagatacatttcatgagactcacctattcctttctgactttgggttctgagcaagagtcctgtatcttctcagtaagttttctttgtttatgctaacttaagtgaattatattacttctaatctaatgatactttactgagacagcataaaaaagttagaatggcaacttggatagagggacttggtttagagacctgtttcattttgaaaaggtttctctcagctttgctttgtcatttacatagtataaatgaacaaaaccccactcaaaggtcagatatcccacaacccaaacatgtactgaaggaagaaacatcctgctttaaatggaacaacaatactatgtttttggctgcatgtaacaaagaaatttaataagagagtcatgtattaattacagacatatttatcctaagatactaatttatatactaattagttgattttcaaggcaaactaatttggttgtttttcaggccacaataaaactatccccaatattttgtatccacattcattttcttaataaatgaccaaaactttaggcaagaagcaaaagcagaatcatgatgaaaatgtgatgtcaaaactttgaagttttaactactagttatgtttcttaaggaatcaagacctgagatgggggactccagattcataacctgataaagtattttcaggtttgaatagatgtttgaaacacctttaaaagccaactacatagcttcagttatgtggaagaatgtgatagataaaggacagcttagattttaaaaacaaagtcaagaaataaatgtgtctataaggtacataaggctacagattaagaaggatgagacctgtttctttaccaaccaaacacttatgcagagatatatgttttcagtgaaacataggtgctgataaatatgcaattttctttggttataaaagattctaaggctcataggtattgctgaatgtttataattaagtaagcttactctaagaagcatgaatttagaacacaagaaactaaaataaattaagccataatttctgcctaagagaaattaaaagttcatgctttttttcatgactactggagtaattgtaggtatactgagcatgcttctttcatttgatttaattttgactctatcaatctatgccctggttaaaactaattctctcctagtgggcttttcttttctttcttttgtttttttttttttgagatggagtttcactcttgttgcccaggctggagcgcaatggcgtgatcttggctcaccacaacctccgcctcccaggttcaagcaattctcctgcctcagcctcccaagtagctgggattacaggcatgcaccaccacacccagctgattttgtatttttagtagagacggggtttctccatgttgaggctggtcacgaactcctgacctcaggtgatccacccacctcggcctcccaaagtgctgggattacaagcataagccactgtgcccggctgtgtccttttcaatagcatgtaattttcttacatattgtgaagtgttttagatgattttttccaatcctttatttatttaatattttgcttgataaagtataattgtacatattcatgggggtacataatgatagtttgatccacataatgtatagtgatcagggtaattaacatatccattgtctcaaactagatgatttttaatgaataataaactgatcttatttctaactagttaggaaaaacaaagaattcttcattatatttatgcacaacacaagggtacttatgagaagataacacttaccatctgggacacaacatttctaccctagtattctattcatggtgatagctaataactgacactattctcagggacagtagcagtggtagtattgccactattatagcccctactctagtcactgccttccagcaaacatgttcttgttatatattttccaattaacacttacataatgtctgaaatgtatggtggtaggtgttttagcctgttttacttcaaaataggaacgtaaggaagataaacatatacataagaagtgagtgtttaagcccatactaaaatttacatgttatactttagcacaacaccttcttcgaagtaaaggggacaactgaaatgtatcatcttgccatgtataaaaaggcatgtttcaaagcataatgaccacactgtaagccttcactctttctctaatcttctttaaatttgcacatgggtaacaggtcagacattcagaatagtgtagccaggtaaatcagaattttcattatctggatttgtatgcctcactgggtgcactgggggaggcctctatgacaagcatgttaaatgtgtacttttctggagcccaaaatgctgaagacattgctttagcctaggtaattcttctcagagaagaataattatttacacatgtacacatacaaaattatatatgctgttcaatatatgttttaaataaagagatatacatacaaattttctagctcttgcttacatttttcatctatagtgctgtaatgcaatgaaattaagcctctctggtaactgcagttctccctgagaataagtttctgttatagtaccattatgctagagggtcccacatatgcctgaaggaaatactttatgacagttgttaatattatagccaaatgatgcttttattccaatttaatcattcataaaaggcacaaatagcacctagtaagtactttcgtttatattttcccgtgcttttaaaatgttgattctatagcatcactcaatattaatataattttaagtattatttacttgtatttggtttgaaatataatgtctgccacttaatggattatttactacctgaaaaaataaactttgaggccagatgcagtagctcacgcctgtaattttagcactttgggagaataaaattgctgaggcaggaggaacgcttgaggctaggagattgagaccagctggggcaacatagtgacaccctgtctctacaaaaattaaaataaaaaaaaatagccaggcttggtgatacatgcctgtagtccagttactccagaggctgaggtagaaagatcacttgagcccaagaggttgaggctgcagtgagccatgatcacaccactgcactacagcctaggcaacagagcaagacattatacccccaaaaataaataaataaaatttgagcctagtagttgttgtcatttgccacttttctagactaaatcattattataagctataccatattactgacatgttttgattaatgtaacaaatgcttttccagcttaacatttttcacagcttattttgatatggaatttctcttaatgttatagtaacatctaaaaatagttttatttagataaatttctttaaaatgtatagtacaaataacatctttgttagatctgtaactaagaggcaataaatttgaagcacactccatatgagaaattgtaaagccaaactaacaaaatcgtgattactttgggatgacacagtgtcatgaaagtcaagaggagagtatcatgaagactgaaaagtgatagcactgaatgctgctgttcttttaaagatgaaggttcagctatcagagcaggaacctaagggcaaaatctgaaattaataaatcaagaaatagcaatataagcatatggctatttaggaataattattactattagataagaagttgcttctggaaagaggactcatgacaacaatggaatcatgggctgttttgtgatactggatttttaaatcatgaagcatgtgttatattttaagccaaaaaaaaaaaaaaaaaaaaaaactggggagggatcttcgtgttggtaggattcgttttccacctttaaaaatttaggtaaggaaagtgggatagaagccagactttaaggagacaagaaatggaaaggaagtagaacagcagccatagactagttcctcaagaagcttgacctgaaagagttatgtatcagttaaagaccatgagatagaggagggtaatctgctgtaagttataacttacacagtttgctgatttttatcatgaattaaaaatatgtacttgtttaaacgttgcactgccatttaccatttgctaagtagatgcataagaacattgaggccaaaattacagtcccaggagcctcagtttcactgtggagttttccctcagcaaatgtttgcttttgcttgtccttttttcttagctaaccttggtttctagatcaagatgattttccttctttgttttcacacagcatattcaattgcaccacactctttttaatcacaattctttctgatgggtttttgattggatccaaatttgcaggctgggccctgagaatctaattcagtctgttgcagtacttctcaatcattttagtcttagaactgctttatatgcttaaaaattattgagggccctgataatttttgtttttgtaggttttgtcttttgacattttccatattagaagtcaaacctaagaaattttaaaaatgttctttatttaaaataacattattcatcccattatatattaatataacatttttctgaaaaagttactattttccagtatcaaataattgaagaagagtgtatattttttccaattaaaaaaattctcttagcaattttcaatgcgttgttatttactatagtcatggttttgtacaacagatctcttgaatttactccaactgaaattttgtatcctatgaagtagttactataattacagataatcaggaaaattgacaaatattaagaacaactctcattcattcaaaatatccaccacttttgggaagtaaaattatctgctcttgtaataaaattagataaaatcttaaaatcaattagatagtacttgagctattacagctttgaaaatgtgtgtccctgtgtttgtgcatgcacacacactgaagtataatttattcagaaacagggcttgttcccacttggcaggagtgttgattttctagcttatctgcagtttgaggtaataagtctaacaagttttgggagatcttaagtattatactgtagtttgaagactgatttgttacatttgcaaattggttggtttccacatacagaccttaatacacctacctgtgttagttactttctaaatgtttgttattgctacaaccatacttacgtgtttcattgaattacaagttccttaagaacagtgatggtattttaaaaatcaggagtagcccaccatgactaggtatatggtattgaagtgctctctgcatatttactgacccatagttggtagataagggttactataaatagaaatagtccgccttattgccgataatggtggtaaaggcataactctggaaattatttttatttttaaaataaaaatgatagaatgagcactctatcttaagttgggtcctactatgatatttgtaacttagatcacttggagacatttcttaggtaccggctaattatttgttaatcaaaataggagccaagcttctaatagaagtgtgtaaaaaacagtaataatgatagttcctggaaaatcacttgcaaatattcaactgcaaaataaacttaagaacttttattaacaatatagattattatgaaagtcaagggatgaaaactgaagctctacacacacacacacacacacacacacacacacacacacacacacacgctttgagatagggtctcgctctgtcacccagactagagtgcagagtggcacaatcacagctcactgcggcctcgacctcctgggctcaagtgatcctcctccctcagcttcctgagtagctgggactataggcatatgccaaatacatctatacatgtaatttccagagttatccctttactacaattctcaccaaaaaatacaaaaatgcgactaatttttgaattttttgtagagatgggggtcttcctatgttgtctaggctggtcttgaactcatggcttcaagtgatcctctctccttggcctcccaatgtgctggtattacaggtgtgagccaccatgtctggccctgtctttttcaatattaatttgaagaacatccttgaatcaatgactattacttgaatataaaggccaaatttagagtttatcaagactcaatagataattacagtagataatatttactgagtacacactgtgtgccaagcactgtgatacatactgtatgcattttcacatttaatcctcaaaacaagtgtgttataattagggcttagcaaggtttaataactattcctagttaagtggcagagctgagagttgaacccaagaatttgaacggtgatttttaagaaattattgatgttgggaggctgaggcaggagaatcgcttgaacccaggaggcagaggttgcagtgagttgagatcgtgccactgtactccagcctgggtgacagagcgagactctgtctcaaaaataaataaataaataaataaataaataaataaataaataaaataaattattgatgctttgaaacgtatgttgttaatatagtcctgtattcaagtgttagcacacaattattttaaaatgtggagctcatcaattattccaaagagaaacttgttataaagtccctaaaatttcactaaggggaaaagctcagatacagacgtgaataatatttcactaagatataagattattagcatgaatgagatattatggggatgcaatgtaacttaaccatatgttattaaaagtgtttttattacattgatgagttatacattcatgggaagtatttatttcatatgttttgtagggagaaatttaaaaggatttggttaaatcattttgaggacataatttgagagaaacataccttttgcaatatttttatatccctgaaaattttttgttaaaagactccatctttaagagagctagagattctctcctggaaagtgactagaccagtgataaaacattatagatctggagtgaacaaattatatcactgcagttctaggggggctattgatataatttctagaaagggaagtttaaaaaatgcctgtatccatagaagtagattctgtagaaatacactgtagaagtacctgttaaacttctcccttccttattatgaggtaaaaaaatcaactatagctattgaatgtaaatgctatttgattatagtagactcttccagatgtaccccattctactcagtacatctgtttctttcactaagcaatgtgttccactcctgaagaatgtttgtctttaatgtatcacattgaaattccttcttattattttatacctttacacagttgatattgttttggttgttattttgcattgacatagttctttatattttcagtgacatcgttctttatatatgcttgttaacatttggcagttaagcatattactaagtttctttttaatgtttttaaagctagttaagagttttaggaaaaatattttctggtgtcaatggatacagaaggttaaatcatttgtctttgtcttgaaagacttaatcagaattgatatcattatatcagtggttttcaaccatggtcgtacattaaaatcgcctaagggaagttaaaagcaaacaaaaatgcgcattaaaaaatgaaaaccagaaaacaatgccaggacctgagattctggtcatctgagattctgatttaagttgtctgggacaaggtccaggcaagagtatgtttaaattactgcccaggtgtttctgatatgtgaccaggtttgacagtcacaggattgaactatccgtataaagcctccctcagtatctaggggggattggtttcaggacgcccacagacgccaacctccaggatgctcaagtctcttatattaaatggtgtagtattaacatgtaatctacacacatcctcctgtatactttaaattatctccagattgcctataatacctaatacattgtaaatgctatttaaatagctattaagtgtatttttgtttgtatttttattgctgtattgttatttttttcctgaatattttcaatcactggttgattgaatttgcagatgcagaacctatggattggagggtagattatattctgtgttcatctcctcttgggtgttaaatatacatttagtacagccatgttgtacagttcaaggagatgctgttcacattgtgttctatatgaatggcacttccttcaggaatgaatggtgccttctggaagttggctgctagttgtataaataagctaatggcttcagtaattgctgttagaggaatatgcattatggcagtagccttcttcacttccggcgtacaaatgattgccttgacagtcactctctatttaaaactggtcagatgtatataacagcaagaccagaaaaagtttgtattttacagtagctgaggatttcaaagttcccaacaggaatgatgggagctgtgtatgaaattaaaatttgcttgaggtttcagaactaagagcatgggaaatggttcagtataattttttcatcattgctgtttatggaagtattatggaaagctgattgcattaggcagggttccctagaaagacagaactaatatatatatacacacacacacacacatacacacacacacacgttatatataatatatatgtatatactttttgtttgtatttttgtataaactcccatgtgtaaatatatatatatacacacacatacatatatatatacacacacacacacatatatatatatttatgtatatgagtttattaacttacatgatcacaagttcccacaacaggctgtctgcaagcttgaggagcaaggagagtcagtccaagtctaaaaacagaagaacttggagtccgatgtttgagggcaggaagcatccagcatgggagaaagatgtaggctgggcggctaggccagtctcaccgttttatgtttttctgcctgctttatattcgctggcagctgcttagattgtgcccaccagattaagggtgggtctgccttccccagcccactgactccaatgttaatctcctttggcaacaccctcacagacacacccaggatcaatactttgcatccttcaatccagtcatgttcacactcattattaaccataacatttatctttctaaaatagaacaggaaaatatccatgattataaaaagagatgcctcattaaatgctattagaataaagaatacatggtacatctattgagtctcttgctaacatgacaaacatacattgctaactgtgcgtaggttctttacattttaattaattatcagtgatgtaaaaatcactggcctttaacaacagtttgatttcaaacccattaaagaggctaaggcaaaaatgtggctttagtctctcagccccattgtgtattctttactgtggtgaatatcaaaacagcagttaattatagtagtaccatttctgttcttcatttcattatctctgtcttgcactattattttttgttgctgctggctatacagcatcaggcctggcaccagcgaagtatgaacacaatgccagcactgcattcagcacaagaatagaaaggcagatggcagattttactatttatagttgtagccaatctgcctgaggtgagccctgccgaaatggttcttatcaagaatgttttcatttattaaagggataggaaatgaaagccaaataaaaagcctcagtcctcaggactctgagagcaaaactcttgctatagattgcaaagcaattccaagtattgactagatatttatgaactagaaaattatatatttaactctctagtctcaaagtaaagacttcaggccagcagtgacttcacagcagaacttgaggaattcattgttcagtgaagttgtgctgccatagcaactgatgcagagtgaattttaattattaagatcaaaataggcttatgataaaaactatttaacaacatcaaatatataaactgaattgtttttactttctcactaatcatttcttgactgctatagaaacagcacaacataactctacttcacatttgattctttatattgttttaaaaaattcattgtttgaaactccagtaaatattttagaatatcaattagtatgttgagataaacattgtgttcaaaattaaaatggcgtgtgaataatctagctttcttatcctctagacatctgatttaaaaagtgttttagtctcggctgggcatggaggctcaggtctgtaatcccagcactttgggaggctgaggcagggagatcatgaggtcaggagattgagaccaggctggccaacatggtgaaaccccgtctctactaaaaatataaaaattagctgggcatggtggtgcatgcctatagtcccagctacttgggaggctgaggcaggagaatcgcttgaacccaggaggcgcagtttgccgtgagctgagattgcaccactgcactccagcgtggcgacatagcgagactctgttgcaaaaaaacagtgttttagtttcaagaacatattgtggtgataactaaaacaccgtattgaagaacccaggtggttcatgtaatctgaaatatagcagtgagttatgatagtggctaataaaatttatattccacagaaaataaaaaccttaattataggctaaagaaattaatttgattcaatcatagtaattaaagaaaaatattttgattggatgtattggaatgtagcagattatttagtaatattctaaattattgcaaagcatctgttcattttaaatcatggtaaaatctgtcatgtgagtttattgattttatttaaatgaaatgattagttgattggaaattttcattttttcaatggcttatactttgatagaagaagcttatagaaaactagttttggaaaggtacagctacaatctaaatttagaatcagattttttgcttcatgaattttatgttccttttcaaaatatagcaaaaaagcaaaaaggacttctggttagatacaaagatatgcagatagcttaggtctttcccaatgaccctccaaaagtaaagaagtttttaaataaataaaattgcaagggcaaagaaaattagcgtggagataagtaataaaatttggaagctggaaggcaggtggatgagtgctaactaatttagacctgaggaatctcaattataagtttgtagtggggaaaactgacaaaaatctgatgtatatatcagcatcttatacaactcagaaattggaaacactagggccttttggaagtaggagttaaagtggtggctgggtgcggtggctcacacatgtaatcccagtactttgggaggttgaggcgggcggatcaggaggtcagaagttcgagaccagcctgaccaacatagtgaaaccccatctctactaaaaatacaaaaattagccagatgtggtggtgcgcacctgtaatctcagctactcaggaggctgaagcaggagaatcccttgaacccaggaggcggaggttgcagttagctgagatggtgccactgcactacagcttggacaacagagcgagactctgtctcaaaaaaaaaaaaagtagtagttggttttcaagatcccatcctcctcatacagctaggccgtcatacagtaaagcctctcctacttggcagaagactaaaggcatatattctgtagagggtaaaatatagttgccaggactgtggatattgcagaacagcagaaggcagagggcaggtgtataaggccattcttgcattgctataaagaaatacttgagtccagacacagtgactcaaacctgtaatcctaacactttgggaagcctaggcaggtgatcatgtgagctcaggtgttcgagactagcctaggctatatggcgaaaccccatctctacaaaaacttagctgggcatggtggcatgtgcctgtagtcccagatactcaggaaagcttagctgggaaattcacttgagcccgggaggttgagaccttgtctagaaaagaaaagaaaaaagaagagggggaaggaggtgaggggagggagacgagggaagggaaaaaaaagaaaaaagaaaagagaagaaaaatacctgaggctgtgtaatttataaagaaaagagctttaattggcttacagttctgcaggctgaacaggaagcatgatgctggcatctgcttagcttctggggaagcctcaggaaacctacaatcatggctgaggtgaaaggggagcaagcatgtcacatggccagagcaggaacaagagagagaggtgggaaatgccatacatttttaaaggatcagatcttatgagaactcactattgtgaggatagcatgaagaggatggtgctaaatcattcatgagaaatctgctcccatgattccatcacctcccacctaagcctcacctccaacactgaggattacttttcaacatgagatttgggccaggatacacatccagacgatattagctggtgaatagtagattgaatcagagatagtacatggaatttttgcctgttgagtgttgagacttcagtcttctgttagccctcagcatattggtaatcaagtatatataatcaaggcaagagaccagaagagttttctatgccaaatttaagaagtccaagaaagaaagacttacaaattccctgggagttccccagggatatagctcagtcacatcatccttcaatgaacacaactgtcaacaagccctgtccgttctactggccttccacttagcttccacttagccctattcttaaatatgagcatacagccaaatatcattaggcattggaagacagcatttgacttttttttagagaccaaaacaaaaaaataaaaacaacttgaataagactatgcagggaagagggaaaaaaacaaacataaaaagaagctaaactaaaattaatatctggggagatgatagaaaatgaaacaaaatgaagatttttaaacatttcttttattgattcataatatgttatgtatttatggggtacatgtaagtatttttacatgcataaaatgtgtaatgatcaagtcaggatatttagggtatcatcaccttgacaatttatcatttctatgttttggtaacattttaagtcccctcttctagtggttttgaaatatatgataatactgttgttaactatagtcagtgtagtctaatatctagtgttagaacttatttcttctatctagctgtaggtttgtacccattcattgacctctcttcatttccacctcccaccatcacgctcttccctgcccctggtacctcattctattctcaatttgtgtgagatcaagttttgtagctttcacatatgagtgagaacatatggtatttatctttctctacctgggttatttcacataccataatgacctcctgttacaatcacattgctgcaatgacaagattgacttccttttatggctgagtagtcttccattgtatatatgtacaacattttctttatccattcatctgtcaatggacagttaggttgattccatatcttagctactatgaacagttctgtgataacatgcaagtacaggtatccctttgatatactgacttcttttcctttggacagataaccagtagttggattgctgaatcatatggtagttctattgttgttgttgttgttgttgttgtttttttaagaaatctctataccgttttccatagtggttgtactgatttatattcctaccaacagcgtataagagtttccttttctccagatctttggcagcatctgttatcttttgtttttttaataatagccattctacctggggtaagatgagaactctttctggtttcgatttgcatttccctaatgattagtgatgttgaacatttttttatatacctgttcgtcatttgtatgtcttctgttgagaattgtctatttgtgtcatttgcccactttttaatgggatatttgttttttcattcttgagttccttggatattctgaatattaatcccttgttgaatgaatagtttgcagatattttctcctgttcaacaagttgtctcttcactatgttgattatttcctttgctgtgcagaagcttattagtttaatatagtccccttgtttatttttgttttagttttttgtgcttttaaggtcttagctgtaaaatctttgcctggaccagtgttctgaagtaatttcactatgttgtcttctattagtttcatagttttgggtcttacttttaagtctttaacccatcttgaattgatttttgtatgtgatgagagataatggtccagtttcattctttggcatatggatatccgattttcccagcaccatttattgaagagtgtgtccttttcccagcatatgttcttggtgcctttgtcaaaaatcagttagttgtaaataggtggatttatttctgtcttttctattttgttccattcgtctttttgtctgttgttgtgctattcccatgctgttttggttactatggtcttgtaatataatgtgatgtcaggtagtgtgctacctccagctttgttctttttgctcaggattgctttggccatcctggctcttttttggttccataaacattttagaattctttttactaactctgtgaaaaattacattgtaattttatagggatcgaattaaattttagattgctttgggcagtatggtcattttaacaatactaattattctgatccatgagcatgggttgtctttccatttgtttatacccttttcaatattttccatcagtgttttatagctttttttggtagagatttttcaccttcttggtcaaatgtattcctaagtattttattttactttttagctattgtaaattggatttccttgatgcttttttggctatttcattattggtgtctagaaatgcttccgatttttgtttgttgattttgtattctgcaactttactgaatctgcttatcaactctaagagattttttgttggactcttttagtttttctaaacataagatcatgtcatctgcagagagggacaatttgacttcctcacttccaatttgtatgtcttttatttatctcttgactgattgctgtggctggaacttccagtactgtgttgaataggagtggtgaaagtgggcattcttgtttcattttgtagaggaaaggctttcaacttttttcggttcagtatatgttagctatgggtttgtcatttatggtctttattattttgaggtatattccttctatgcctagtttgttgacagtttttatcatgaagggacattgaattttgtcacacttttttctgcatcagttgaaatgatcgtatggtttttgtctatcattctgttgatgtgatgtatcacactgattgatttgcatatattaaatcatctttggatctctggtataaactccacttgatcatgatgtattatttgattttcgtttccctgatgattagtgatgttgaacattttttcatatacccattggtcatttgtatgtcttcttttgagaattgtctattcatgtcctttgcccatgttttaatgggattatttgtttttctattgtcgactgagtttcttgcatattctgggtattagtcctttgttggatgaatagtttgcaaatattgtctgttgtgctgttgaattacggtttgctagtattttgttgaggattttacatctgtgttcttcaaagatattgacctatagttttttgttgttgttgttgttattatgtccttgtctggttttggtatcatggtaatgctggattcatgatatgagttagggaaaatttgctcctcttcaatttcttggaatagtttgaggaggattggtattagttctttgtgtgttcggtagaactcagcagtgaatctctccagtcccggcttttctttgttgggagacattttaattattgcttcaagttctcgttactggtcttttcaggttttctgtttcttcctgattcaatcttggtaggttgtatgtttctaggaatttatccattttctcttaagttttccagtttgttagtgtatcgttatttataatagtctattatgatcttttgtagttttgtggtatcaattataaagtctcctttttcattttttaaaaatttgggtcatttcttttcctggttagtctagctctagtggtttatcaattttttcttttcaaagaaccaatttttcatttcattgatgctttatattgcttttttagtatctattttgtttagctctgctcttatctttattatttcttcctttctaccaatttgtggtttggtttgttcttgctcttctagttccttgaggcatattgtcagattgtttatttagaatctttttactttttaaatgtaggcatttattgttttatatatctcacttactactgcttttgctatatcccacacatcttggtatgttgtttttccattttcatttcttgcaagaaatatttgtatttccatctgaatgtttttattgacccagtgtttgttcaggagcattttgttcaacatccctgaatctatggctttcaacattcctcttggttaaaacttctagttgtatttcattgtggtctgagaaaacatatgatttttattttgtttttttttttttttttgagacagaatctcactctgtctcccggaatgaagttcagtggcacgatcttggctcacttcaacctttgcctccctgattcaagcgattctttgcctcagcctcccgagtagctgggattacaggcacctgccaccatgccccgtgaatttttgtgttttgagtagggactgggtttcaccatgttggccaggcaagctggtcttgaactcctgacctcaggtgatccgctgcctcggcctcccaaagtgctgggattacaggcgtgagctaccatgcctggcctatgatttctgtttttacaaatttattgagacttgttttgtgccctaacctatggcccatcatggataatgttccatgtgctgatgaaaataatgtctattctgcaatttttggataacaatctctgtaaatgtctgttaggtccattaggtctgaagtccagtttaaatccaatgtttctttactgattttctgtctagattatttacctaatgctgagagtggagtgttgaagtctcccactatcgtgttggagcctctgtctccttaggtctaataatattttatttatgaatgtgggtgctctagtgttaggtgcatatattaatatatttagaaccattatatcctcttatcctcctcctggaataattactttatcattatatacttgtcttttttttttttttttttaccttattttgactcaatgtctgttttatctgatgtaagcacagctactcttgcttccttttagtttccatttgagtagactttttccattccctttactttcattctatatgtgtctttacaggtaaagtacatttcttgtagacagcaaatagttaagtcatttttttaattcattcagtgagtctatatctattaagtgaagagtttaattcatttatattctaggtggttattaatatataacattttgttgctgtcatatagtcaattgtttttggttcttttctatattttttgctcctttctcttttcttgtttgtcattgtgttttggtggttttctgtagttgtacctttctcctcctcatttgtgcttaagttttaaacatttgcgtattttcatgatggtagatggttgtcagtttgcttccaggtttaggactcccttgagcatttcttgtaggtctggtctggtggtgatgaattccctcagcttttctttgtctgggaaagactactttttcttcattttttaaggataattttgtttgctatggtatccttgactggccttttttttttatttcagcgcttggaatacgtcatcccattttctcctggtcagtaaggtttctgcaaagaaactcattgttagtctgatggttttttttttttttaattataggtgccgaaacacttttctctttttgtttttagaagtatttctttgtctttgactttagacaatttgactataatgtgctatgaagacctttttatgttgtatctgcttggggatctgagagtctcctgtatctggatttctaaatatcttgccatacttgtctgttatttcattaaattggttttctaaccctttcattctcccttcgccatctgggaccctggtaattcagattttggtcattttatgatgtctcacatatcacaaatgtttcactcattcttttttattcttttttatttttggtctgtgttatttctaaagacctttcttctgcttgttctactcttttgttgaagctgtagttccagaacttttgtctggttctttttttttttaatgatatctatctctttggtatatttctcattcatgtcctgaattatcttttgttttttgttttcagaattctcttatatctccctgagcttctttagaattgataattttcattttctgggatttcatgaatttctttttgattgggatgtttctggggaattattgtgtttctttggaggtattaatatttccttgcttttccatgttttctgtgttattacattaatatctatacatctcatataacagtcgcttctttcagttttttgaatttctggcttttatagaggaggacttttcctgaaaatgcatctatgatgttggttttttaggacactttggctttgattctgggtgcaggctagtagtataatctttgcatgatttctttaattgtaaacaacaccagtggtgtctgtgatttccttagtggcttagggtgtagttattagtggaggttgtgctggagtttttatggggatttggataccaaatagttcagtatttggggcctagtggtggcagtggtaggtttggtgtgcctgttcctgggcctcagagttgcatacaccagcactgatgttggcacgtctaggtgggccaatacttgggcctccaggtgacttacccaggtgttgaagccttggttccagcaagtgggcaggttcttaggcctctgggcagctagtgtggcatgggcaatgacagtgacaatggcgggacaaccctctggttcctgagcagtttgctttcatattgggttgctgcaatgggatgaacaggccagtctccaagccctcaggcagcatgtgcttgtagatgttagttgtagtggtattagttggatggaaaggcccaccctcaggcccatgggagtagtgttcagatgccaacaatggtggactgggctgggtactcccctgacccccagactctgctctggcatggagaaggcaaagcttggccaggtaggcttgtccttaggtcctctgatagtgagtgcaggtaccagccatgttacgcaggagtgggtcaatgcgcatgctaccgtcaggatgctcagctggtgggaggaagcagttgtgctgctgccttgacactgggaagggcgggactgccttcagtggcaggcagcctaggcctctccagtggcaaggcagcagcacaactgccttgtcactgggtgtactacttgcacctcagtcccagtggtgcttgtgcctcagtctcctgtgcagtagcccatgtttgctcatgtctaagccacataggcagctgccatgcttctcttgagcttcagccctggcactgttgggttccaggacagtacataatctgttgtagacagcactcaaaaatggtaccttgctgtagctgtttaggtctcagggagtgtgtaggacccagcatgagctctttcccctccttagagcagtgctgttgcacaatctcatggtgttaccctctgttagtttcagagcctgtaaggactgaggggttctcccaaagctaggatttcaggagtccatggtgggaatgtgatctactgaggatctttcaattaccttttccccacattggggagtagctctcagctccctgctgatcccagccaagcagtctgcctcccttcctttctccttgctttaggtatttcctgtcactttctgttaaatcccagtgttctctcttggatgatctatttgaagtatggttattcactcactattttggttcttcttagtggaggaagcaagtaagacaatcaaaaccaagatttttatacatacatacatacatacatacatacatacatacatacatacatacgtacgtttgtgtagggaacatgcagggtattaaaatcagcttgtggaatttttttttaaccagaaaaaaattttaattgaatctaataaagggttagaaaatgaagttgagcatatctctagaaaacagtacagagagataggaaataggatagacaataaaattagagaactcatagcagtaaaaagaacagacttgctacacataaccccatgggtgaatctgaatacacagttattgagtgaaagaaaccattcacaagggagtatatagtagacgctttcatttatgtgaagtataagaatagataacactacgttcatggtcataatagtggctacctattaaagatggctataatacaggttagttataacacaggaagatgggttgattcatatacctatcagagatggtataatacaggaagataaattgtagttcaccaagtatatatacatggaaaaattatttgtgctatatacttaagttttgcttattgtgtattataaacacaattgaaataatagaggaggaaaaaatcagagaagcagtctaagatgcacaacacttcagcaataagaatttcagatttagataaaaataggaaaaatatagggcagaaaaaaagaaatacatcaaggatgttttctggtattgaggacaagtattcaaaatgaaagggcacactagttatccagcatattggataaaattcaataaaaatgactgtgtggcttagacaccagccaggggcagctggttgcatctttagttcaagctacttggggggccaaggtggaagaattgctttaagctaggaatttgaggctgtagtgtgctttaatcacacctctgattagccactgcactacagtccaggaaatatggtgagatactgtctcgggggtggggggggggaagatataccaaaacatattattgagtaattgtggaaccctaggaataaataaaagatcttacaaacttccaaatgagaaaaatataggttttgctgttcaatagaaatactggaagaaaggagacaatggaacatcatcttcaatatctgagaaaaaattatttccaacctagaattttatacctagcaaaattaccaattatgaacatctccattcagcttttctcaagaagctactgtagtatgtttgctgccaaaaataagaaaacaagtagaaaggaagacataagatatagaaattagaaaatctagtatgagtaagagaggtgaaaggaacccttgggaagagggaaaggaaaattccaactcgacagctgattagagggcctattgagaaagcagtttagatcagaagtcagaaggatcacaggagttttttgttttttgtttttttgtttttttttttgggacacagtcttgctctgtcacccaggctggagtgcagtggcacagtctcagctcaccgcagcctttgcctcccgggttcgagcaagtctcctgcctcagcctcctgagtatctgggactacaggtgcgcaccaccacacctggctaatttttgtatttttagtagagacagggtttcaccatgttggccaggctggtcttgaactcctgacctcatgatccacccgcctcggccttccaaagtgctgggattacaggcatgagccactgcgctcagccagatgtttttcaagaagatgaaattgataaatattgagagtatttaaacacattcagggaagattcataaaactgggggactgttttgagtacatagaaaacagcaaacaaaaaacaagataggtatgaactgtggaggaaactgagaaatggaatggaaagacaatactatattatccagtcatgaatggattatgtaactacatgactctattaatagaaatatctcatccagatagtgtattacatataacggaatactataaagcagcaaagaggagttaatcacagatatataaaaaaaaatggggagtaagaaaaacaagttgccactaataccacttataacaagttttgttgtatttctaaaaactgataaaaaactatagaatataacatgataaatatccatgtatccacaactaagcttgagaaataaacactatagccgggcacagtggcttacgcctgtaatcccagcactttgggaggccgaggtgggtgggtcacgaggtcgggagatcaaggccatcctggctaacacagtgaaaccctgtctctactaaaaatacaaaaaattagccaggcgtggtggggcactcttgtaatcccacctagtcgggagactgaggcaggagaatcgcttgaacccgggaggcagaggttgcagtgagccaagatcgcgccactgcactccagcctgggtgacagagtgagactccgtctcaaaaataaataagcaaacaaatataatggaatccttccatgcgctcccctctggtaccatcgctcttcgtctttgtctgaaggtaaccactgttttaaagttcatacttgtcatttctgcatacgtctttatactacatacagttgactcttgaacaacatgggcttgcactgtgcaggtctgcttacatgcagattttcttttacctctgccacccctgagacaacaagaacaatccctcctcttcctcctcctcctcagcctactcagtgtgaagacgatgacgatgaagactttcatgatgatccacttctatttaataaatagtaaatatattttctcttccttatgattttcttagagtttcttttctctagcttactttgtgtgacaatgtagtatataatacatataacatacgaaatacgtgtttttgtttttgtttttgttttttgagatggagtttcgctcttgttgcctaggctggagtgcaatggtatgatctcagctcattgcaacctccgcctcctgagttcaagcgattctcctgcctcagcctcccaagtagctgggattacaggtgcccgccaccacacccagcaaattttttgtatttttattagagatgaggtttcattatggtggccaggctggtctcaaactcctgacctcaggtgatccactcgcctcggcctcccaaagtgctgggattacaggcatgagctaccgcgcccagcccacaaaatatgtgttaatcaactgtttatgttatcaccaaggcttctggctagcagtaggctactagtagttgagtttttggggagtcaaaagttatacatggatttttgactgtgcatagggccagtgccccaactcctgcattgttcagaggtcaactctgtgtgtgtgtgtgtgtgtgtgtgtgtgtgtgtgtgtgtgtgtgtgtgtgtccctaaacaatatttagcaagttgactgtttttaaactttatatcaatggtgtatattaaatatgatcgtctacagtttgcttttacagctcaatagtttaaaaacaaaacaaaacaaaaagctgcagtaatccccctgccgttattcatgaggattacatttcacgacccccagtggatgtctaaaactagattagtactaaatcctgtatacattttcctatacatatgtacctatgatggtttaatttataatgtttgcacgggagattaaaaacaataactaataataaaatagaataactagagcaggccaggcaaggtgactcacgcctgtaatcccagctctttgggaggctgaggtgggcggatcactggaggttaggagttcgagactggcctggccaacatggtgaaaccccgtctctactaaatacaaaaattagccgggcatggtgtcatgtacctataatcgcatctactcgggaggctgaggcaggagaattgcttgaccctgggaagcagaggttgcagtgagccgagttcatgccactgcactccagcttggatgacagagcgaaactctgtctccaaaaaaaaaaaaaaaaaaaaaaaaaaaaataattagaatagtatgccagtatcactaatcttgtacattgtactttggagcaattattagggaaaataagggttacttgaacatagcactgtgatattgtaatagttgatctgatgacagttgaatggtaacccagaaggtgactaacaattagtgtatacagtgtggtttgattcattgaggttatgctcacatcatggtcaaaagatgaaagtggaatggtttatatctccttgttctcaggaaaaaataaaagtttttgaatgccactgttcaacttgacaccataaggttaagtattgttttgttttcttgatctgttgcagttaagacaatttgcatgcatcttttaggtatagctgtaaaattttctcttttgaaatgtcatgagtcaaaattgaactgtgggaaataaaaaataaagaatttgtctctatttatttttttaatgaaaatctctttgtatctcagaatttcatgatggtctaggaggcctgaaactctgtaggtctagactgtgaggatctctgagaactgcatgctctgcatattataggtactcaatcagcactgattgctggtggcttaaactgcaagaactacgttatagccagcaagcaaagatgcccaattagtcagtgagtgatttgccaggggaagtctattttcagcctgggtagttactattaagagaggatcctagaagctgcactttttgcctgctaggtgttcggaatacttttgaaagaactgaagtgttcagttcagtggagacatcttagatcctctatatttacaaatttacagcccttcatttcccaatttcttcaacctttttccttcctggaagtcatgctttcatagtttaggggaaataattagttttataaaacattcagttcctaaaagattaataattccaaaggaaaatatattaattgtagttatgaaaaatgcactgacaacaggctatcagctttcagaattgcttcttagtttttcattaaaatagaaaactcaaaatgtctcatgagttttatagaaaaattgagcatatttaaaaattaaatatgtataattttataagaacaaaaaaggtttgaccttgaaaatttttttcttcagttttattctgttacaggacagtgcctgcacattagtaggcacttggtgaagatttgtgaaatgaatgtgatagcataatgttattggaattcatcattgctgaattaatgtatatttgtggtttctgtaggaaatcttgtccttatctcacctcaggtttttaccataacatttttttcctctttgcaaatatcttttgattggtattttaattattgataaggtgtgcacttggaacattcattcaaaatgaataattccagtgtcaggggaaaaaaaaaaacctctggaaatttaatgtatggctttttttaagtgtatatatcacttttttttccaaaggacagtttgaaagtgaaatactccaaagtaaaagcaattttaactttctgaaactgtgtatgtttgtttgcgtgtgtgaaaaaagatggaaaaaaggaaagatagaagaagggagggttgggagattgagagagggagagagaggagagaaatgtgctttctatgaaattttgacacatttccaggataactgagaatgataaattaagtaaaaagaaaaataagcattcttattttatgtgggaagaattatgctttttttcctttaaagaaattgatttttatgaaaacaagcaataatagctttaacaaatacataaaaatttttagatcaagctgataactgcttttagataatagcctaagtcactgattagaagggaaaacccatctttggaaaatatcttttggaaatcatcttttgtgtatcatgttaaaataaaaatttttcttagtcatttcaaggaaattttctaacattaggaagggaaatattgttaattcttttcagcagaaggtagagtaccggcattaatgacaaatacatttttaccttagaccttttaaataattacttttttccttttaatagagaaaaggacacatttagatattggatgtttattttacattttaaaacaattttctttggggaaaaaatagggtgaaagttcttgtaaaaccaaggaaattttgaatttgtagagcataagtagatactgacaatttttcttgctacatctgaagttagttatttgacttaaaaggccaacaatctcatttattggtttctttgaagtagttggttgccttttttctctcccacaccaaactataaagataatttcataaacctctttttagttgagcttttgggttttgctaatttttctgacttagatgaagtttcaattaaaaatagactataaacttatatgtgggtggcagttgaatgagttgctatgacagttcatattatgaggttgaaccaaatgcaaagtagcttaacagaatttgagaaacatagagctatatcagtactaatgattacccttctttaacctatgctgcgtataaaggaacatgcctttctctcagggtacaaaagttttactggagaaatcagtgaagcctgtaacccttatcctactgctactaagaacctattttcctaaggaacaccccactttcccacttgtggatattggtaaaaggtcttgggaatatcaagtctggtctgtattttcccatcctctacaggtaatctcagaagaggtgcttaataaatgctatacaccatcatccaattcttgctcctcctgttcctgaaagaaagtttagccaggcagggtggcgggcacctgtactactatggagagaggtgtagagtggtgctacctgagagcataacactaatgatctgccatcgtgtgaattttccatatttttctgcattgtttgtggtcattgtggaaaagtatgattctgatgcatgtatcaagatcttttaaagaacacaaaaaagttataatttttttcaactctaaaatcttccagtgaaactaacttttaaggaagatcttccatgagtatcaagtggcttcacataccctatgcaagagtattgttcaataagggctcacccagttagttactctcttccttagtccaccttttaaaaatgctgccagatgaatctccttgaagcttacattgttatgtaatttccttattttctttagaaacaaattcagaactccttagcttacctggtaatgctctctacaatctgccctgaacctccctttccaatcttagacctcatttctctcgtcatacgtgctgtggtacaacaatctctgaaccctgctttgggaaaaccatttctttgcttatgttggtacttccatttctctttgctgtgaacatttgaactatttccaaagtccagatcaaatgcctagtccctcttaggctttctcctgcttttcaacctaggagtagtaatttttctcttttttggtttctttgtaaatctcttctaaattttattagtatttaacccttcccttatagttctttacacatctttttgttctctgccagaatataaactacgtaagaataatcttttacatgtttccaaacccaacattgtctactctgtatcctgtatagtttgtgccctgtaaatgtctactgaattgaacttaaactttgaagtataaccctatagacataccactaatctagggacgtttgtatactctttcaatgctaccatgtactctttgaactgcatcttgacatttaatttttctatgacttagttttttttaacccacaaggtggttataatgatatttcactgtgcactataaaattgttatgttatctttcaaagaactactttgaattccctgggagacaaatggtcaaatatatgaaacccattatagaatttcacctctgacatatggcacaacttagagataattttgtttaaatgccaagtaacctggagctataagtcccgtaataccacataggtatacatgtttatgtatatgtaatcgttcatgtttataacctcattttgtagtgtgatagtaggctatggtaaatttgtcttaaaattttttaggaggccaaaattcttacagaaaaacatattagtgtagtgttgagagtctaggcactagagatagactgcctacgttcattaaaaagttaaataagttgcccggggtcacacaaaagactaaagggtgatttgaacttaagtttcctcatttatcattcagaataataagagctcctatttacagtatagttttcaagaataaattacctaatactggcccatagtaaatacatatttattatttttattatattttcatagataaatcatacataggcttagttggaggttaaacttagtggtaaagaacttagcatcaggtaaaccggggttttatttttgatttatttttttcatttcttttttttcttttttttattattttctttattatacgttaagttctagggtacatgtgcacaacatgcaggtttgttacatatgtatacatgtgccacgtgggtgtgctgtacccattaacttgtcatttacattaggtatatctcctaatgctatcccttccctgtccccacaccccacaacaggccctggtgtgtgatgttccccaccctgtgcccaagtgttctcattgttcaattcccacctatgagtgagaacatgcggtgtttggtttaaaatccttgtgatagtttgctcagaatgatggtttccagcttcatccatgtacccacaaaggacatgaactcatccctttttatggctgcatactattccatggtgtatatgtgccacattttcttaatccagtctatcattgatggacatttgggttggttccaagtctgtgctattgtgaatagtgccacaataaacatacgtatgcatgtgtctttataacagcatgatttataatccttcgggtttatacccagtaatgggatgtctgggtcaaatggtatttctagttctagatcattgaggaatcgccacactgtcttccacaagggttgaactagtttatagtcccaccaacagtataaaagttttcctatttctccacatcctctccagcacctattgtttcctgactttttaatgatcgccattctaactggtatgaaatggtatctcattgtggttttgatttgcatttctctgattgccagtgatgataagcattttttcatgtgtcttttggctgcataaatgtcttcttttgagaagtgtctgttcatatcctttgcccactttttgatggggtagtttgattttttcttgtaaatttgtttaagttctttgtagattctggatattagccctttgtcagatgggtagattgtaaaaattttctcccattctgtaggttgcctgttcactctgagggtagttccttttgttgtgcagaagctctttagtttaattaaatcccatttatctattttggcttttgttgccattgtttttggtgttttagtcatgaagtccttgcccatgccaatgtcctaaatggtattgcttaggttttcccctagggtttttatggttttaggtctaacatttaagtctttaatccatgttgaattaatttttgtataaggtatacggaagggatccagtttcagctttctacgtatggctagccagttttcccagcaccatttattaaatagggaatcctttccccatttcttgtttttgtcaggtttgtcagagatcagatggttgtagatgtgtggtgttatttctgagggctctgttctgttccattggtctatatctctgttttggtaccagtaccatgctgttttggttactgtagtcttgtagtatagtttgaagtcaggtagcgtgatgcctccagctttgttctttttgtttaggattgtcttggcaatgtgggttcttttttggttgcatatgaactttaaagtagttttttccaattctgtgaagaaagtcactggtagcttgatggggatggcattgaatctataaattaccttgggcaatatggacattttcaaaatattgattattcctatccacgagcatgggatgttcttccatttgtttgtgtcctcttttattttattgagcagtggtttgtagttctccttgaagaggtccttcacatcccttgtaagttggattcctaggtattttattgtctttgtagcaattgtgtatgggagttcactcatgatttggctgtttgtctgttattgatgtagaggaatgcttgtgatttttgcacattgattttgtattctaggactttgctgaagttgcttatcagcttagggagattttgggctgagatgatggggttttctaaatatacaatcatgtcatctgtaaacagggacaatttgacttccccttttcctaattgaatatcctttatttctttctcctgcctgactgccctggccagaacttccaacactatgttgaataggagtggtgagagagggcatccctgtcttgtgccagttttcaaagggagtgcttctggttttggcccattcagtatgatattggctgtgggtttgtcataaatagctcttattattttgagatatgtcccatcaatacctagtttattaagagtttttaggccgggtgcggtggctcaccacctgtaatcccagcacttttggaggccaaggcaggcatatcacgaggtcaggagatcgagaccatcctggctaacacagtgaaactctgtatctactaaaaatacaaaaaattagccaggcagggtggcgggcacctgtagtccctgctactctggaggctgaggcaggagaatggcatgaacccgggaggcggagcttgtagtgagccgagatcatgccactgcactccagcctgggtgacagcacgagactccgtctcaaaaaaaaaaaaagtttttagcgtgaagggctgttgaattttgtcaaaggccttttctgcatcttttgagataatcatctgttttttgtctttggttctgtttatatgatggattatgtttattgatttgcgtatgttgaactagccttgcatcccagggataaagccaacttgatcgtggtggataagctttttgatgtgctgctggatttggtttgccagtattttattgaggatctttgcatcaatgttcatcagggatattggtctaaaattctctttttttgttgtgtctctgccaggcattggtatcaggatgatgctggcctcataaaatgagttagggaggattccctctttttctgttgattggaatagtttcagaaggaatggtaccagttcctccttgtacctctggtagaattcagctgtgaatccatctggtcctggactttttttggttggtaagctattgattattgcctcaatttcagagccttttattggactattcagggattcaacttcttcctggtttagtcttcggagggtgtatgtgtcgaggaatttatccatttcttctagattttctagtttatttgcgtaaaagtgtttatagtattctctgatggtagtttgtatttctgtgggatctgtggtgatatcccctttatcattttttattgcatctatttgattcttctctctttttttctttattagtcttgctagtggtctaccaattttgttgatcttttcaaaaaaccagctcctggattcattgattttttgaagggttttttgtgtctctatctccttcatttctgctctgatcttagttatttcttgccttctgctggcttttgaatgtgtttgctcttgcttctctagttcttttaattgtgatgttagggtgtcaattttagatctttcctgtttactcttgtgggcatttagtgctataaatttccctctacacattgctttaaatgtgtcccagagattctggtatgttgtgtctttgttctcattggtttcaaagtacatctttatttctgccttcatttcgttatgtacctggtagtcattcaggacaaggttgttcagtttccatgtagttgagcagctttgagtgagtttcttaatcctgagttctagtttgattgcactgtggtctgggagacagtttgttataatttctgttctttaacatttgcagaggagtgctttgcttccaactatgtggtcaattatggaataagggtgatgtggtgctgagaagaatgtatattctgttgatttggggtggagagttctgtaggtgtctattagatctggttggtgcagagctgagttcaattcctggatatccttgttaactttctgtctcattgatctgtctaatgttgacagtggggtgttaaagtctcccattattattgtgtgggagtctaagtctctttgtaggtcactcaggacttgctttatgaatctggatgcttctgtattgggtgcatatatatttaggatagttagttcttcttgttgaattgatcccttcaccattatgtaatggccttctttgtctcttttgatctttgttggtttaaagtctgttttatcagagactaggattgcaacccctgcttttttttgttttccatttgcttggcagatcttccttcatctctttattttgagcctatgtgtttccctgcctgtgagatgggtttcctgaatacagcacactgatggttcttgactctttatccaatttaacagtctgtgtcttttaattgaaacatttagcccatttacatttatagttaatatggttatgtgtgaatttgagcctgtcattatgatgttagctggttattttgctcgttagttgatgcagtttcttcctagcctcgatggtctttaccatttggcatgtttttgcagtggctggtaccagttgttcctttccatgtttagtgcttccttcaggagctcttgtaaggcaggcctggtggtgacaaaatctctcagcatttgcttgtctgtaaaggattttatttctccttcacttatgaagcttagtttggctgaatatgaaattctgggttgaaaattcttttctttaagaatgttgaatattgtcccccactgtcttctggcttgtaaactttctgccgagagatccgctgttagtctgataggcttccctttgtgggtaactcgacctttctctctggctgcccttaacattttttcctttatttcaactttggtgaatctgacagttatgtgtcttggagttgctcttctcgaggagtatctttgtggcgttctctgtatttcctgaatttgaatgttggcctgccttgctaggttgggtaagttctcctgggtaatatcctgcagagtgttttccaacttggttccattctccttgtcactttcaggtacaccagtcaggtgtagatttgtttttttcacatagtcccatatttcttggaggctttgttcatttctttttactctttttttctctaaacttctcttcttgcttcatttcattcatttgatcttcaatcactgataccctttcttccacttgatttaatcagctgctgaagcttgtgcgtgcatcatgtagttctcttgccatggttttcagctccatcaggtcatttaaggtcttgtctatgctctttattctagttagccattcgtctaatctttcttcatggtttttagcttctttgcaatgggttcaaacatcgtcctttagctcggataagttcgttattactgatcatctgaagtcttcttctctcaacttgtcaaagtcattctctatccagctttgttctattgctggcgaggagctgcgatactttggaggagaagaggccctctgatttttagaatttttagcttttctgctctggtttctccccgtctttgtggttttatctacctttggtctttgatgatggtgacttacagatggggttttggtgtggatgtcctttctgtttgttagttttccttctaacagtcacgaccctctgttgcaggtctgttggagtttgctggaggtccactccagaccctgtttgcctgggtatcaccagtggaagctgcagaacagcaaatattgcagaatggcaaatgttgctgcctgatccttcctctggaagcttcatctcagaagggcacctggctgtatgaggtgtcggttggcccctcctgggaggtgtctcccaattagactactcaggtgtcagggacccacttgaggaggcagtctgtccattctcaggtcccaaactacatgctgggagaaccactactctcttcaaagctgtcagacagggacatttaagtctgcagaagtttctgctgccgtttgttcaactatgccctgcccccagtactggagtccaggaaggcaggcaggcctccttgagctttggtgggctccacccagttcagtcttcccggctgctttgtttacctactcaagcttcagcaatggcggatgcccctccctcagccttgctgacacttgcggcttgatctcagactgctgtgttagcagtgagtgaggctccgtgggtgtgggactctccgagccaggtgcgggatataatctcctggtgttccgtttgctaagaccattggaaaagcgcagtattagggtgggagggtcccgattttccaggtactatctgtcatggcttcccttggctaggaaagggaattccccaaccccttgcacttcccaggtgagcaatgccccacgctgctccttgggctgcacccactgtgtgacaagccccagtgagatgaacccggtacctctgttggaaatgcagaaatcacctgtcttctgcgtcgctcacgctgggagctgtagactggagctgttcctttttggccatcttggaacctcggttcaaacctgagttgtaatactcactcttcctgttgctgcctatgtaattttgtagaagttacctaattgcttccaagcttctgttggattttttgagaactgaatgacatagtacattttgaatgcttaatgtattgctttgtgcatggtattatttaataaatattagctttggttatacttgcaatgttctgttatttctctttttcacacatgttgcttgcaatctatatggcatctattttagcattaaagtagaaagttttaagtagaaaggttctgtcataaagaaaaaaagaatcttaagaagataaatctaagtggaaatttaaagaaaataaggcttttttagatctagcctgtaaactcctttagactcttgaatttgatattctggtagctcttccgagtattaggaaaaaaagtcctttaagctgctctaaagttgggtctggaagcaatactagaaaaagtagaaactggaaaaatttcacatctttagatcaatgatgtccaaagtgaagagtatactataaccaagtgggtgagagaacatattagaccacctacttacatatattttatctaaaaaattttaaagtacaggttgatagtagtgtatgtaggtagcctattaggtataaatatattgagatagtgactcagttttatttttaaaaaatagactattaaaccactgctctagagaatggctgtattaagccaaagttttagtataaacaaagtttagatatttgttgttcatatattttagataacacccagttctgtacatttatcagctctttgctttcctgtaatgtgccatttgtgataagggggaataggaacttttctctgaatccttttccatagaaggtgcttttaaagatgcctctttcagtccttgctaggtaagggaattagaaccattagaattgctttacaaaaattgaggaaaagattatttgtttagctatttgtttttagtaaattgcatcctttgcattaagataaagcagttggccgggcgcggtggctcacgcctgtaatcccagcactttgggaggccaaggcaggcggatcacgaggtcaggagatcgagaccatcctggctaacacggtgaaaccccgtctctactgaaaatacaaaaaattagccgggcgtggtggcgggcacctgtaatcccagctacttgggaggctgaggcaggagaatggcgtgaacccgggaggcggagcttgcagtgagcagagatcgcgccactgcactccagcctgggcgaaagagcgagactctgtctcaaaaaaaaaaaaaaaaaaaaaaaaaaagataaagcagttaaattaacacaaggccaatagggattttattaaatttcctttttaaaactgagttttgacatagagatttaaaattaaacagacctgtattcaaatcttcattcttgatcttgctagctgtgatgtttctttgtgtgtaaaaagttaggggtataattatagtagccttttcctgctaccacctggcatttagcagaccagttctcagtgaatgtgagcgttgattatttttaaggtggtagagagctgatgaaaagagcaagtaagcctgggtgcagtgactcacacctgtaatcctggtactttggaaggccgaggcaggaggatcacttgagcctacgagtttgagaccagcctaggcaatgtagcgagacctcatctctgcaaaaaaataaaaaattagctggatgtgatagtgtgtgcctgtatgcccaggtacttaggtggctgaggtgggaaaatcacctgagcacaggaagttgaggaagcagtgagctgtgattgtgctactgtacttcatcctaggcaacagagtgaaacactgtctaaaagaaaagaagaaaagaaatatatcttataccatagggcttaactttctttaaatgtgtgtaaattgaaagtaattctgtgttcttttagacatggggaatttatctgcaaagtttggatatggagtcattgtatttgtatttaaattgacgttagatgcatcagtttattacctattacatagtatttgaaaataatcatatttattttgtcttttagcaacagatgaaatttagtcttacaccgagacagactattcacctagttaaatatgaagggtctatgaaggtctccatgacaccctgtaaccagctgcaatttgacattagacttgatgttctgattacttatactttttgttttagttcctttcctgagcctgaattgtacaaatatgtcctaaaacaccaacttattaagaggcttaatgcctgttaaatgcgtcagtgctcttggcagcttagcatgagtgctttctttgcatgggaggttgcagtttagaagcaactttatggatcatttcccaggttgatgttacatatgttcattttacaacctgtgtgcataatctctcagggtgaaggtaattaagagaaagcataatctacagaattgaagccaagtaatctaagattctgtttttaaactctttgctatataacattagttaagttgtttaccctcttaatttatccatttgtaaaatgatagtttttgtttttaaagtgctctattacccttactttaaaagtcctgtctaccatatatttaaaactataagtggaaataatgaagaaactctgaacttgcttttgcttatatatggatatatcatattatatgcctaagattggagataaattttataacctgattttctcatggcagtgtacaaatgaaattattctgtaagtttttcaaaacagtaaaatcactatttttcatctttttgtgagatgtacttttttcatacccacagaaatttgcagagggcttctgcataccacccatcttccaatatttcagtatttggctaggttcccctcattttgcttaattattcattttggttggaaagtttaactgccactgaaacttcagattctatatccttaccactttcctgatttttaagtttaacattcagtaattatttgatgtttattttagctgcataggtttaagtaacactaaaagtatacctgaatctctaggtagcatatttacaagcttagttagaagtaccaaaaagggcttagaaaataatttaaaactacaatagtgatctaaagtttttaatgatttttcaattatgaaaatgttttactattgtgcttatcccatgaagatttaaaaatttagtggccgatacttgaaattgtataggtagataggatacagcatatgttattttcagtgtatctaaaaccatgaacttgggtcctgtgtgagtgcaaagtggatactgaaaactagtttaatttcctcagattcatctgataggttatatcctactcaaaaatgacaggaaagccaaaggctactatgttagccatttctgctgactcttattggtatcctgtaccctatacttcttaaacagattacattttttcagtatactagtagatctcaaaaggagatagaagaagcagggttatttctccagggtagagtattgttttgactatttcaattttttcttaatgtaaattatagaaagtaaactcaacaaaattttctttcagaggatgggaaagtggtggctgtaggtacttgaaagataacataagaaagcattaaagggggagactggattttaaacattggaatgcaatcctatttagatattgtaacatagcattcttgtaaagagaaaagccactgcaagtctctacaaagttggccaccattccaggctaaattttagaagtatgtagagatgaagtaaaaatctgagacttttagtaatagctcttgagatctcaagaaatggaacaagctgaagaagtaaaactattgaaaagccaagccaacttgttgctgaattccctaaaccaagaataatttcagaagcttaatttttttcctacaaatagtatagaagaattaacattaccattaaataggggttgagcactataccagtctgaaacccttgagattaaaactagctagaagacaagctgcagaagacaagacagtttataatcccttccttcagcctcacccaaggttttggaaataatcttatgacagctgagagtaagccaggtgcagtggcattccctgtagatccagctacttggggggctgaggtgggagcattgcttgagcccatgagttgaaggctgcagtgcactgtgatcatactgtaaatagctactacacttcagcttgggcatcatagtgaaaccccatctctaacaataataataacattttaaaataaattattaaaatttcacatttagaattatttttctactacagtaattggtacctcagtcacttaaaatggtaacactagttgagaattatacctccacaaatatatatctagataatccattatgttgtctctagcagatttttctgaggaaaaccaaaaggaggattggtaattaaaagtagttaatttttacattcaagaaaggaaaggactattctttgaacaaagtcccaagtcatgaataagtaatcaccagtaattagaaatcacttttgatcagtacacatgatgtgaaaatcagccaatcagtgacagcctcactccagtggccatgcttctgaaaatcatcgagtcaacaacagccttactccagtaactatcttctgcaaattagcaaatcaacgatagtcctaggcttctgaaagtcagccagcgactactcttgtatgttctgcatactgactcattatttgtcattaaaaattcaatggacaaaagaacaaagtatgtctgatgtggctgctttagaggccaggatctaaatggacccaagattcctagttagcatctgatagaacttttagatagaaagtcagcaaggatataaaagatctgagtaacacaaccaacctacagaatctaactggcatttataaaacccgctaccaagctgggcgcggtggctcacacctgtaatcccagcactttgggaggccaaggcaggtggatcacaaggtctggagattgaaatcatcctggctaacacggtgaaaccccgtctctgctaaatatatatatatatatatatatatatatatatatatatacacacacacatatacacacacacacatatatatatacacatatatatacacacatatatatacacatatatatacatgtatatatacatatatatatatacacatatatatatatatatatatatacatacacacacacacatatatatatacacacaaaaaattagcctggcatggtggcacacgcatgtagtcgcagctactcgggaggctgagggaggagaattgcttgaacctgggaggctgaggttgcagtgagctgagatcgcaccactgcactccagcctgggcgacagagcaagactccatctcaaaaaaacaaaagaaacaaaacaaaaaccactctacccaacaagagtagaatatgagtggaacatcaccaaggtagatcccatcctgggccattaaacaagcctcaacatatttaaaagaattgaaatcatatagagtatgttgtctgaccacagtagattcaaagtagaaatcagtaacagacaacaggggaaaaatgatccatgggtcaaagaggaagtctcaaaggaaatttaaaaatacatacaactgaatgaaaataatatatatcaaaatatgtgggaggtagttaaacctcccacatgtgtgctgacagggaagtgtacagcagtaagtgctcacttttgaaatgaggaaggttctcagatcaatagtgtaagtttctttctcaaggaactactaagtttctatgtaagagactagaaaaagaagagaaaataaacccgaagtaagcataaataaataaataatgaagacaaaaacagaaatcgaagaaattgaaaatacaaaaacaacagagaaaaaccatgaaacaaaagctatttttggaaaaaaaaattaataaaattggtaaacctttgacaagactgaaaaatctaagaagggaaggcctgaatcaccaatatcagaaatggaatagtggatatcagtacagatcctgcagccattaaaaagttaacaagaaaacactataaacaacttgatacccataatttagaagaaatgaatctcaattctttgaaaaccacagactaccaaaattcaaccaaggtgaaatagacaatctgaatagctatttaaccattgaagaaattaaaagctcctgaaaaagaaatcaccgtgtcaagatatttcttcttttttaaaaaagatattaatacatgtttaacaacattcattttatcctttccattttggcatggcacatgatcttcatctggatttatattttatgtgataaatgattttttaatttaagttcaagggtacaagtgcaagtttgttacgtaggtaaacttgtgtggtgggggtttttgtatagattatttcatcacccaggtattaagcctagtattcattagttgtctttcttgattatctccctccttccaccctccgcctccaccctccaaaaggccccagtatgttgtttccctctatgtgtccttgtgctctcatcatttagctcccacttataagtgagaacatgtggtatttggttttctgttcttgtgttagtttagtaaggataatggcctcctgctccatccatgtccctgcaaaggacataatctcattcttttttatgactgtatagtattccatggtgtatatgtacaccatggaaagaatgagataaaaaagaatgagatcctatacaccatgaaataccaatactctttatccagtctatcactgatgggcatttaggttcattccatgtgtttgcttttgtgaatagtgctgcagtgaacatatgcgtgcatgcgtctttataacagaatgatttatattcctccgggtatatactcagtaatgggtttgctgagtcaaatggtatttctgtctttaggtctttgaggattcaccacactatcttctacaatggtggaactaatttacactcccatcaacagtgtataagcgttcgtttgtctccataacctcaccagcatctgttattttttgactttttaataacagccattctgactggtgtgagatggtatctcattgtggtttcaatttgcatatctctaatgtaatgatcagtgatgtttagcttttttccatattatttttggccacatatatgtcttcttctgggaagtaactgttcatgttctttgcccactttttaatgaggttgtttttttcttataaatttgtttaagttctttatagatgctggatattagacgtttgtcagatgcatagtttgcacaaattttctcccattctataggttgtctatttaatctgctgatagtttgttttgccgggcagaagctctttagtttaattagatcccatttgttgatttttgcttttcttgcaattgtttttggcatctttgtcatgaaatatttacctgtgcctacaccgcaaatggtattgcctaggttatcttccagggtttttgcagttttacgttttgcatttaagtctttaatccatcttgagttgatttttgtatgtggtataaggaaggcatccagtatcaatcttgtgcatatggctagccagttatcccagccaagatatttcactagtgaattttaccacacattttaggagaaattaacttcaagttcacaaaatctcttccagaaaagagaagaggagggaacacttcctgactgattttatgaagctaatgttattactctaaaacagacagattgtacagaaaaataaaactatagaccattatttctcacaaatgtacatgtaaacattttcagtaagaatcataatgcagaaatcctcaacaagaatcatagaattagggtcaggcgcagtggctgatgcctgtaattccaacacttaggaaggcagaggcaggcagatttcttgagcccaggagtttgaaaccagcctgggcaatatggcgaaatcccatctctgcaaaaattagctggacgtggtggcacacacctgtagtcccagctccttggcagggctgaggtgatagaatttgggccggggaggtcgaatctgcagtgagctgagatcatgccacttgcactgcagccagggtgacagagtgagaccttgtctcaaaaaaataaagaagcatagaattagaaggaattacaatcaatattcctcctcttcaagattaataaagattgcaactttaatggcaacctcaattctgtgctgttttagttactcctcctatagtctgaaaatgaattgatttaaggcaaattcagtaggtttttacagtttcatttgtcatcagtgtttttcaaatataagtacttttgcaaattggaccaaattcttggtgcaatttaaaaacttgggccttctatcatttgcctattttgagaaaggctatttcccttttctttgattttctattttttagagtgttgaacctacttaatctgaagtttacctcccttttaaaggaagtgtctagaagtgtttctggcaatgtgttcataattaggttaaattttcctcttgataacctggtggctgtagaactgaaatcactgtgagttaaaataatcttagtgtgtctgtgtccccttggcatttgtaaatgagttccttgaaattttgtattggtatgttttaaaacatcagtacttttatttcaaagtaaaatatgccataatatgttttataggatgaagtgtttgttttttatttatacactataattacgtgttgtatcaccttctttgaaaagacatattttaaaataatatctcaattttaggcaaagcacattcctagaagtttaaaattaacattttctgtctaaattaaggagttaattttctgtgaaaataaaatgtttgtggggggtgagtcttatcacatatcacagatcatacttgttttaaaggaagaaaatgaaagtcatttttaaatttagttggtgacataagcagaaagcatgtttactttttgatacttaataacacttgaggtaataataaacaatgataatttcctaatcttttttgcattgttgtaattaagcttacacttggagtttccaaggccaacatgtaaggaattgctctttaattaggtttccaacagttagaataagcaaaaggatggctcatctgacattgcagtgtgtcctgatagagttcccttagttatggttaatgcagataaagaaaacagcaagcatactttcacaattttatattttctgtataaatgagaattcttatttttagagaagtatattgaaaagtaataacacaaattaaataaatggaatagactataaatttagggccatttaaaaaggattacatgtatgccaaggtacaaattatctttcatactcaatttcagctgttactcatcactgcttaacctactcttgagtaataacaacattctttaagctttaaaacattctctaatgtgtttttaatatagacagaatacccatcattagctttatggcaaaagcccttgcaatcatttatttcccttaatcacgtaagcatcaaaaatttattgatcacctggtctaattatatgtagtgttgtaagtatgtctcaggattcattcaacaaacatttgtcgagcatttattatgtaacaagaaaaatgtatgtcccccccccaaaaaaaatgtatgttccctttctttaatgtttactgtgaatagtgaagatatagatatacatagaaagactaataattcatggaaggaaattatcagtgttgactctcaatttggggaagagttttgaagagaaaaaagatcacttttggtttgcagtggatattgatagtctcaaaggtgatggaatctctgtgtaaagatgattttgataaaggaaggatttagggactacattatggtagagaaccgagagtgaaattataggaatgggaaagaatatgtctcctattctttttcaggagaagtgactatgtcagtttgtttggagtgcaaagttcatcacagtagatgaatgaatggttagaaaagaaaggtattagggactggatattgtaggactatgtttggatcatatagtgggaatgaaatataaaagctgagttcgtttgccttttttttttttttttttttttaagatggaatcttgctctgtcaccaaggctagagtgcagtggcgcgatcttggctcactgcaaccttcacctcctaggttcaagcgattctcctgcctcagcctcctgagtagctgggattaaaggtgcccgccactgtgcccggctaatttttgtatttttagtagaaatggggtttcaccatcttggccaggttgttctcgaactcctgacctcatgatctgcccactttggctccacaaagtgctgggattacaggcgtgagccaccactcctggcctcttttgactttgaaaaattatttcattacatatgttcattttagaaagattagaatatactgatgaagaaaaagtagaaaataataacacaaaatcaaagtttttagaaatgcttatttggtgttatccaggatggatgaaataaaaggatgactgaaggtgggaggccagttaggaggctgttttggtagtcttctttccctcttccccatcctgtactcttctcttttatcaaatggttgtactggtggcaaaagcttgaaatttgaggagtcagagccaaaagaaggatgcagcctgaatagtaactctgggatcaggttacacagttgaaataatagacattacacattacttttctttcctgggtcttgaggaagttctttagtgagggctcaagaaatttggaaatatttgtagatggatgaagtaagttcaactttggtgatggctttatgcagtttgataagtgcacatttctccgagtacaaacttatgggaacattattggtggtgagaaggaggaatctggagatttgtactaatgagttagtggcatttttgtagagggagattcacatctctgaattcttcaaccatcccaaaattgagcatgtcacggaatctttctggctaacagtaagctgtaggttgttacatcctttaatgccatatgtctgcaaaggatcttatctcatctatatatactcttgaatgacatgaactggcacatttatgactagtgcaaagggactaactcgcattcgcatgcaaatttctgtggctggaaaggtcagcccgactggcttgtgcagcaacctttgccattgcccttgtttgataatgctgtgaatttcccatgattttcctaagtgtagcttggaggttccactcaagatcaagcctgagattccccatgaactcttcaggactatggcaggtctaatatcttcaatttggacattatcaactgccttgctgatgccttgattgaggctgagtgataccagtgtgtatctgctggatacaaatatcacttctgtcattccgatggccatgtgtatctcttgcttaggtagcatttctggcctgaaccagtgataggctatataccaccagagtatcctccagaaattcttctccttacttctgtgaccctaccccatccccgtcattctacttctactactttggggaactgtggctccaccataaccttgatgtaagagcaggtgctagcaccccattgaatatttccacttagatcatatcagagactgtacctgaattatatcatcctgttgttctcatggccagatatgggggcagccagcccaagctaggatcccagtggtttctttagctttataccaagcttgaatgaactagagatgttgcccaagaattctaagcctctggagactaaactgcctgtctaaatccttataggaatacagactcattcttaggagttagagttttacatccttcaggatatacattggaaaagaacaattgctctgccaggagggctgctgctttttgattgagaaagatgatgcggccatggaaagcacatggaccacatcaacttggggtcagggttatcagagggcaggcagttccagtgctaccacctgagcactcttcttcagaagaaaaagaaagcactccagcttaatccttgtattttaactattcccaatttaaagagttacactgcagccttttgcagccgcttccttatcccctgaaggggaatgggataaggaaaacattctcctttccctgaagagtttcccttgaaaattgaagagagaaaaattttaagtcatcagataaaggcaagggcagttcatccgtattactctttgaggcacggatatatctcaattaaaatctgtgttaattttcccacagttcagttgtattgacctttttcattcaaaaggtccagcctggggctgcatgccagccaacttggtgctttctgtaaaagccatgatgttttctctcagcctaaggaaattctttgtgctgttttatagctttactgccagagtaagttataattgccattgaatcaatatatatagcttaataagtttgctgctttacccagtttaatcttgtctcattttcaaagtttgccaagagttaccctagagagacaaatattctttctgtgtcttctatcattctgttgaccttcatagttgatttggctgatctttctaaacaaaggaagaccaattaatggttaaaggtagaagtatctggacctctactccaaataaaagctttcaagttacatttggagatgatactcttgaatattttttaaccatactgtgtctcttaaacaaatgctgctgcttacccataacatgctaattaataccttatatatctcattcctgataatgaaaagttactagtaccatggtgttgggaggttcattcccgtgggcattatatgaggctagaagaaaacaaagacatgacaaatctatagacttatggttcaggcagatactttctttagtttttttctcagtcattatgaatcttgcattctagacaaatgtagatgtatttctctcagagtaaagaatggaagaaacctgaaggtagctctctgttgacagagaaagaaggaattacctatctggaaataatctgttcagtatagttttattgtcagagtaagttaaaatgaatgattctgccaaaatgtcaagaatgggtcacctaggcatcctttccagaaaaggggcatctagtcagtcatcctttccaagctatgcttttgttacttaagtattcactgaaatgtaaataccatgtgttttatcattttttatactctgaaagtatcattttactaatatgtttttgaaataggtactatattttctattgctcatattatcataagtcttagaactttatctattcaaggtaataaaaatttcaactttggtctgcccagactgtagaaaaccaagcattgacacacacataaaaatatgtatatacacatacagaacatttactttatcaaaaagaagagtgcatagggacttcagatcactgtattgtgaagggacttatccgcatctttgataatttaggatagagtatcttaaaataacctttttatgttctagacaccaaactgtgctggactggtaacatattaagaatatgcttaaaacattctctcaatggaaatattacctttttaaaatattttaaatttcaagacggtagaagtccattttcttgtactgttgagtgagattgaaaataagactagagaattgagtggaagaaataatttcatttgagccattccatttcacgtctttcctaaatggtcagttcttttggttctggttctattgaagtcctcatgatgagaaacagggttagtaaagccaaaagcatgacctgggaacaataatgggttattgattctgccagaagtccacctaccagtggccctggcactgtgagaatagagcaggcacatgtatccaaaaaagttcccttttggccgagtgtggtggctcacgcctgtaatctcagcactttgggaggcctaggagggcagatcatgaggtcaggagttcgagaccagcctggccaacatggtgaaaccctgtgtctactaaaaatagaaaaaattagccaggcgtgttggcacatgcctgtaatcccagctacttggggggctgaggcaggcaattgcttcagcccgggaggcagaggttgcagtgagctgagaccacgccactgcactctagcctgggcaacagggcgagactctgtctcagaaaaaaaaaaaaaaagtttccttttatgaaagctgtatttcagtattgacaattgcagttcccttttgggtttctgtgtcaagaagacttttttttctaccacgtttcctcatcctgcagactgcactaaactgtgtctccaccttcaccccctcagaatatacccaagtgtagtattcatggtagtcccatatatcagttcttttttcagtcacatcaaagttatgcaactggtgggtgccccatcctatgagttaagaatttaagaactgtgaatagaaaagaatattgcgactggtgggtgacacagtaaataagtaagctgagaataggggcaggggaatctactttgtaagtcgtgttaattgtgatgattctgggaggcagaattgctgctgatggagaaccactactttatttatttacttttttcagcttttattttagcttcaagggatacatgtgcagattgttacatgagtaaattgtgcaatgctgaggtgtaatgtacaaatggtctcatcacccaggtagtgaacatagtacccaataagtagttttttggccatcctccccttcgcaccctcccccttctagtagtccttagtgtctgttgttcccatctttatgcccatgtgtactcagtgtttagctcctgattataagtgagaacatgtggtatttggttttctgttcccgtgttaatttgcttaggataatggcctctagctgcatccatgttgcttcaaaaggacatgatttcagagaaccactgctttaaatcacataaattatttacggaaacatacttcttgtaatgcaattagtcttattttgccacagtggagttacttatgtgtgtaaataaaatttagagccagggtgaacaaacaaggccctgaggtcaaatctggcctgccttgtgttttgtaataaagtttgtctctgtttgcagatgacatgatcgtatatttagaaaaacccattgtctcagcccaaaatctccttaagctgataagcaacttcagcaaagtctcaggatacaaaatcaatgtgcaaaaatcacaagcattcctatgcaccaaaaacagagagccaaatcatgagtgaactcccattcacaattgctataaagagaataaaatacctaggaataaaacttacagggatgtgaaggacctcttcaaggagaactagaaaccactgctcaaggaaataagagaggacacaaacaaatggaaagacattccatgctcatggataggaagaatcagtatcgtgaaaatggccatactgcctaaagtaatttatagattcaatgttatccccatcaagctaccattgcctttcttcacagaattggaaaaaattactttaaacttcatatggaaccaaaaaagagcccacatagccaagacaatcctaagcaaagagaacaaagctggaggcatcatgctaccttacttcaaactatactacaaggctacagtaacgaaaacagcatggtactggtaccaaaacagatacatagaccaatggaacagaacagaggcctcagaaataacaccacacatctacaaacatctgatctttgacaaacctgacaaaagcaatgggggaaagattccgtatttaataaatggtgttgggaaaactggctagccataagcagaaaactgaaactgaaccccttccttacaccttatacaaaaattaactcatgatggattaaagacttaaacataagacctaaaaccataaaaatcctagaagaaaacctaggaaataacattcaggaaataggggtgggcaaagacttcatgtccaaaacactgaaagcaatggcaacaaaagccaaaattgacacatgggatctaattaaactaaagagcttctgcacagaaagagacagtatcatcagaaggaacaggaaatctacagaattggagaaaatttttgcaatctatccatctgacaaagggctaatatccagaatctacaaagaacttaaacagatttacaagaaacaaacaatcccatcaaaaagtgggcaaagcatatgaacagacacttctcaaaagaaagacatttatgcagccaacaaacatatgaaaaaaatgctcatcatcactggtcattagagaaatgcaaatcaaaaccacaatgagataacaatctcacaccatttagaatggcgatcattaaaaggtcaggaaacaacagatgctggagaggatgtagagaaacaggaaagcttttgcactgttggtgggggtataaattagttcaaccattgtggaagacagtgtggtgattcctcaaggatctagaactagaaataccatttgatccagcaatcccattactcagtatatacccaaaggattatcagtcattctgctataaagacacatgctcacgtatgtttattgcggcactattcgcaatagcaaagacttggaaccaacccaaatgtccatcagtgatagactggataaagaaatgtggcacgtatacaccacggaatactatttagccataaaaaaggatgagttcatgtcctttgcaagtacatggatgaaggtggaaaccatcattctcagcaaactaacacaagaacagaaaaccaaacaccgcatgttctcactcgtaagtgggagttgaacagtgagaacacagggacacagggaggagaacatcatacactgggatctgtgaggggctggggggctaggagagggataacattaggagaaatacctaatgtagatggtgggttgttgggtgcagcaaaccactatggcacgtgtatacctatgtaacaaaactgcacgttctgcacatgtactccagaacttaaagtataataaaaaaagaaataaaaatgaagtttgatattatcatttacatatcatctgtagttacttttgtgctacagagtcagagatgagtaattcctgtagacataagtactggccaccaagcttgaaatatttactatctggctctttaccacaaaagtttttcaacatattagagtgttttagagtttgacagtgcatcctttgctatgcactgagtcgtgagctgtagtgagtgcttaaacttaaaatttatgtttggttttatgtgaaagctttgatgaaaaaagatttcaatttgcacaagtatgttaattagatatgaaattaacagttattgcatatatttgtgctggctgccatatggatatacaatatagtacattaattaaaagagcagaaactttggagccagactgctttggttcaaatcctggctctacttttctgtcatctaaggcaagtcacttatcctttgtgtgccccagttctcttaaccataaaatgaggataatattaaaacttgcaaggactaaataaattagcgtatgcaaagcatgtagaaaatgttttccatgtaataaacactaattattactgtgataaccgaagggttccaaaatcaactcaatttttggcctctttaattcattacatagcaatgaagtacaaaggtgtgaatgtgtaatagttgttttcagagtaaaatgggggaaaatgatttcacttaatttgtttctttccctaatgctagcatctccagtggcacagaatataccttttctgttctggtccgcaaaattgtacagaaatgaatgaatggggggaaagctgttgaattggcatctacccaggctacacatttaactccagccagagattaaagtcacagaaaaaaatgttgttaccccaggtcttgccactagtagaaaacatgacctctaaaaaaaattatgcctttttcaaaatatttattactttcaatgccttccctgggatggttactccagctcctgcaaagctctgccttgtagtaataaggggtatccatcagagtttgtgtgccccagcaagtctcctcttcttgcttcttagaaatgcacattttagtataattttctatttatggtatatcattgttcccaaaacacaaagatgattataaatctttttaatctcatatcatatctaacagttatcgtttccttatttttctttttggaaaaccacaaacaagattggtaaatctcaagataaaatttttattcccatttttttcccctgagacatactggttctgttagatctgtcacatatattatgattgatcagcttgcaactaattattgaactcctttgtatgcagttaatatttaccatttaggatatcagctactctaccaggtgctttgcatgtgttgctttgtttaatcctcacagcaacccataagatacaactattattatcaccattttacagttgtgtatagtgaaacacagagaagacaagtaactttttcagctcacacatctggcaaagtaggctgccagggttaaacttgactgtgtctgattctgatattttcaatgactcttattctgcttcctgtactctttttcctacttgtttgaaacacctcagatcccctgggcagagtagatagatgtaattcagggactctggttggatttcaggcagcccaagtgccttggaaagcattttcctggcttagagatgtcaacttcagagatgtgaaatatatgtaaaattagaggagaaaaaaacttatttaatatttttagaattctctagatcctatggataggaaaattgttttaaaagtagtatacctgaataaggtgggccaccctgaacacataccaaggattagctgtcttctagttcccaaatacaatacaactcccccctgcccgaaaaaagttattttataatatcatgctatgtatcttcttgagtattgtgatcattttctcctagaatatcaaatatttgccataactttaataattctttttaaaaggacagagagcatttgttattgagtatgcaggcagtatgctttgaagatagaggtcacatttagtgagggattcgtggtttaatagattggaagaagggattattagatgggatgggtttggtggaatatgtgagttttctaaagtcattaggtgttttatgcatgagaacataaaagagctggggctggaatcaattttattctaatctaacagatgtcttctactcttaagacacctgtgtaatgaaacgtggctttccccatatctccctactttcactccacttaattaatatacgtggctgtacattgacatactatatcatctattcctaatagaggggttttgcttccttagattttaattatcaataacttcattgcagtattctctgctttcttggtttccagctaattgccccacttgttttttgtttgactagttactttcttcttcatttatgacccctgtctgtagcttatcttggcttctactttctcttatgttctcccctgaattcctttacgtatgttaatattaagctgattgtcataatatttataaggttttcactgtctggacttgacgcagtttggaattttcctagcacatctgaagttaaattttaaataccaaacaaagttgtgctggtttgtatagcttaaacaccagcattttaaataaatgcaaaatgcaataaatgttttcagacaggtaattgttgatttgttgtataacattgtattaataatttctcattcctgattaggttaaatttctttacaattcattccaaaaaatacaaagatatctcagtgatacttacagttggtgaatcctttacatttttttttttttttttttgagacaggttctggttctgttacccagtctggagtgcagtggcaataccttgctcactgcagccttgacctcccggcctcaagtgatattcccacctcagttcctcaagtagctgggaccacaggcacatacatgccaccacatccagctaatttttgtagaaattaggttttaccacgttgcccaggctaatactttactttttattgagtcttttttctgtggtgtcaagcttttggtaatttcattgttgttagctatttgtatcaccaatagaagttaagcagagagcaagagaagaaattccaatttgctgtttgtcagtaactggagaggaagtgaggggtgggagacggagaaagatctggctggagagctgtagtttcacctacaaagagtttttttgtttgtttgttttaatttcgttttttcttttaatttggggagcttgttggatgctatagggaggaaaggtggaggagaacttctggtggtaattgttattcaccctgctctgctttagtctctgatagaattagtgtcatggttgatgttttgtggcattttttaagactgcataatccagcaacttatgattccctgttaggcaaggaaccatagctttcagtgtatacttacagagtgactgagacagtatcacttcttctctttatgccttatattcttcatttataaaatggagattatagacttgtccttgaatacctattgaagtaattgcaaaaattccatatgtatttgagtctttgcgaggccttgaacgtagagtttaattaaacaagaccgtactaagagtcttttgtatttatgtgcaagagttttttcctgatggcactattgatcatgttgggaaagcaaggcctggttagtggatttattgtttaggtgttttacagttatgatagttttcatttgctattggccacaggtttgaaaagagtatgaaacaactatgtagaaaattttctagcatctcccagtcccagaaaagcttcatcagccttcaagagtctatgaagtatgactataatgtaatgtgcctgatattttttattgtggtaaaacataatatttatcattatactctgtgtatacatattgtatactgataagtgtataattacactgataagtgtataattcagtgacactaaatatgttaacagtgttgtataaccattaccactatctatatccaacactttatcattatccccaacaaaaactatgcccattaaacaataactcccacccttctacctctccccacagcccctggtaacctactctactttgtctttatgaatttgcctattctaagtacttcatataggtacaattatacattattttccttctatatctgccttatttcactaagcataatgttttccaggtccatccatgttgtggcatatgtcaaaatttaatttctttttatgactgaatattattctgttatatgtgtaggtcacatttgggttagccatttatctcatgccttatattttaatttataaaatggtttcataataaaaggctgtgatttaatatctaaataaaggataaaggaagagtatattttgttagaggggaaatgaattatggaagatgaatgagtagtaatatggcttagcagttttaaatgaggataattatggtctaagttataggggttgttttgaggattaaagagttagtatatgtgtcttaacaacaatgtagtattataacagtataagtgctatttggctgtttgctatcattgttattagttgatgagagcttcgtagtagagatcacaaatgaggcagaccttaatgcaactctgcaggatttgattagaaaaggaattttaaggtaaatgtagagagaaagcagatggcatgtttttacaataagaaagatgtcacactggttaaacacatagtttttgagaccaacagacctgtgctccagtctcagcattgccgtatatttactgtgtgacttggaatataatctttctaagctttaattgtaatctataatatgtggatatgtgttaattcattcttgcattgatataaaggaatacctgaaactgggtaatttataaagaaagtacgtttattttgtcacatgatccgggaggctgtacatgaagcatagcaccatcatctgcttctggtgaggaccccaggaagctttcagtcatggcagaaggtgaaggggagccagcgcatcacatgatgaaagagagcaagcagggtggagaggcaccacactctttcacacagccagatctgtgaacctagatgagtgagaaatcactgatcaccaaagggatggtgctaagccatttatgagggtctgccccccatgacccagtacctcccactaggccccaccccaacactggagattatattttaacatgagatttggagggaacaaacatataaaccgtatcaggataataatgataacatcaaagtattattatgaggattaaaatgagtaagacacttggcatgttacctggcaatgacaaaaaactttcaaacagtgatagcctctattaatttaatacttttggtggttaccattttttatcattgttagcattatccacattggctcatagtgggtgacacctttggaaaggtattagggaaataaagaaagaggagttgtaagtgattatggcatacctttaaaataggagtgtgcacttgaatttaggcagtgggatgccactaaagttttatttgagagaaagactgagtgtgtgtgtgtatttgtgtgtttgtgtaagtgtgtgtacatgtttgtgtattttggcaggaacattaataagaagaggggccttgctgaaagcagtgatttgtaaagatctgtttacactatgcagataatttgggatttggaaaagaatagataaacaaaagggaacaaaattgcttatacaatttttaacagttagaaggaaattagtaagagaaaaaaatctgaagaaaaatgtttacatgtgttgggtatttaattgtatgccaggcactttgctaacctctctatgttgattactaccatttcatgttcacagtaaccttataatggaagattctattattgtctccattttatagatgagaaatcaaggacataaagtggttacggtcacacagatagtgtggcagagacagctagtgtccccaaatcctttctcaccttttccccatactaacaacattttcatctgggcatgtgatgactccaagtgaaaaaccacatttcttaatctcctttgtagtgaagtatgactgtgttgtgcaccccacccagccctcaaaaaaagagttgtgaataattttggagaactttgagagttggcttgtaccatctgaccttcttcccttccttattctgccttcctcctgttacagacatgtgacagtcatagctcatcttagatcatgaaggccagggctgcacggtagaatggtagagcgtaaagcagggagggagctggatccctatggaacttggaaaacagagcatccacaccaatcctgtactgccaacctttgggcatttacattagaaagaaaaataagctgctctctggggtttcctcttactttttcacctgacacgaatccttactaacaaagatcagagggcactctcatccacagtgtatactctttaccttggctactctcagatgcccaacagtttttataaggaattgtaaagatctaactcttgtattgtatagctcagaaagccaaatttactgaagttaggcccatgtccagagatggattcaagaattcagtggtgtattttctcagctttcttgagtaaaaattaacgaagtagagaagtttgaaagctctgctgcttcttccttctgctagacaaggttgtttgcatttctttttactttgcataaatatctctaattttgagaaaagtaaccttagcagataaggaaagaagttgaagggtagtttgtttaattatcaagagcaatgatgtataaatggcttttgggaaaaaatgatatctaactttaagttaagaacctgtgtagttattatggaatgaagtgaattctgtaaaaccattgatataaggtaagtgtgcttttagatgctgcatgttattctatgatttttattttgagcaataacaaaaagatgttgaaattataccagttgaccagttgctgacaggcaatcctaaagtattggctggaactgataagaggttaccagcattacatattcatagatattctcaacttgaagtactttctaaagcaaacagttctgtcatcatcactatgcatagaggtataacggtgatgcagggtggttttcagatagactaggtttttattttgcctctatactggacaggttgagtgaccacagagctttatatcttagtgactagtggttaaagagattgcatttgcattatcctaagtgaattagcacaggaacagaaaacctaccactgtgtgttttcacttataagtcggagctaaacatttgatacacacgaacataaatatggcaacaatagacactggggactgctggagaggggaagaggggaggagagtaaagattgaaaatgaactgttaggtactatgcttactacctagaggatgggattaatcatacccccaatctcagcattgtgcaatatactcatgtaacaaacctacacatgtcccctctgaatctaaaataaaagttgaaattataaaaaataaataaaaagacaaaaaaactatagtgagatatcatctcatcccagttaaaatggcttttataaaaaagtcaggcaatacccaatgctagcaaggatgtggagaaaagagaacccttgtacactgttggtgtataaaattagtacaaccaccatggagaacagtttagagattcctcaaaaaactaaaaatttagttgccatatgatgcaccaattccactgctgggtatatacccaaaagaaaggaaatgagtatatggaagagatacctgcacttccatgtttgttgcaatactgtttacaatagctaagatttagaagcaacctaagtgtgcatgagcagatgaatggagaaagaaaatgttgtacatttccacaatggagtactagccagacataaaaagaaggagatccagtcatttgcaacaacatagatggaactggagatcattatgttaagtgaaacaagccagacacagaaagacaaacatcacaggttctcacttatttttgagatctaaaaatcaaaacaattgaactcatagagagagaatagaaggatagttaccagaggctgggaagggtagttttgggaggcagggttgcaggggaggagggatgggcaaaaaaaataattagaaagaatgagtaagacctagtatttgagagcaccacagacactatagtcaataataatttaattgtacactttaaaataactaaaatagtataattggattgtttgtaacagaaaggataaatgcttgagggggatggatacccagttttccatgatgtaattattactcattgcatgcctgtaccaaaacatctcaattaccccataaatatatacacctactgtgtacccacgaaattaaaaataaaaaaatttttaaaataaattatatttcataatcagtggtgtatgcatgcaatataaatgcttgttcctagaggatttcaagatcatatggtctttctaagtcacatactataccaaagctcttcagacaagagcttcttatacagtctgaatttgtgcagaatctcaaaagggcaataaaattttgaaataatgtgattaactccaaattcattacgaattatgtagtttccgtgctgggaaccaaatgaattataaagtatgtttacactgcttcaacacggtggctccattttagctgcaaacagaaattcttatcatttttttcaggattagtcccaaatactcaagtttaagttatcctaaatctttctttaggaacgcctcacaaataaaatataagaaattttgatattgtactcttggcaaagttttgctctgcttccctaatctaatgggacagtgacagcttacaatgaaacattttcaaaaacattccctgctaaatcaaactgaaatgcaggggatttacatggacatttgagatcgtttggtgtaatagagcatggactgtcaagtaagaagtttcacatggactacggagtaagaccagtccttctaccatcttggaacttgacctttttttgtaaaattggaaacataacagctcaccatcttgttgagaagactaaatgaagtaatgtgaaagttccttaaggaagaaatgttaaatgttattacgcttgacctgttttcttgttaacatcttatatcttgaaattttctttaaagcctctaaatgttgtttttgtttgtttgtttgttttgacggagtcttgctcagtcaccccaggctggagtgcagtggtacaatcttggctcactgcaacctctgcctttagggttcaagcaattctatctcagcctcctgagtagctaggactacaggcatgcaccaccacgcccagctaatttttgtatttttagtagagacggggtttcactgtattggccaggctggtctcgaactcctgacctcgtgatctgccctcctctgcctcccaaagtgctgagactgcaggcgtgagccaccctgcccagccaacgttgtgtttttaaatacgttaaagttacagcatatggttttaaaagcctttatttctccagtcaaatattagaaactcaagaaaaaggatgcactaagttgaaacttgctctactactttggcagccacacttaaggcagaaaagtaagttaaagatcttatacctttgagtttaaaaacaaacagtgatttttctcatttagcagccctgtgcagaatcatagcagaatcatctcatctctcttgggagaaatgttggcagttaattaagccaattccttcattttgtggttaagtgcactcagatccagggattaatcgactttgccaaagtcatttatctagttaactgtagaaaaggcagaacctcttgaattccaagctagtggctatttcacttagctagtatttttaaaatcattgactttagtgtgtatatatatgtatacactatttatgtgtgtatatttttaaaatcattggctttagtgtgtatatacactatatgtgtgtgtatatatgtgtgacatatatacacactatatatgtttatatgtatgtgtgtatatatgtgtgacatatatacacactatatatgtttatatgtatgtgtgtatatatatatataatttgtgtgtgtgtgtatatatataacttttaatgttattttccagtgtcaagagaccatttgaaattaaatctggcttcaaaaaatgttaccatcaaaagtcattaagtgttttctggttttgatatttgtattgcgattatataagagaaggtccttgctcttggtttacacagaaatattttgtgatttaaaaatattaatgattactgcccaccaatttttatgttaggtatttttcaaggcactgggatttttcttttgaaaatcttatccttgagagatttgatctattactatgttatggtatatttttgccttatagtgattatgatttttttctttctgcttctgaaatgtggtagatatgtgtagaaatcataagaaatggccattcttggtgtcaaacttgttttatcttcaattatcataataaactattgaatgcaaaaaaaaaaataaagttgctgagagtagtaagtgcttaacagaaatatttagaaaaaagtaaaaccaaacccagtaaagacctcattaatttaaactctattaaagaaggattgtgaacagtacttgaactgaaatttagttttggatccagaattctatttaattgcctatgcaaaataataatgtgaacaagattagaaagggaatgttttcaatagttaaaagaacaaaatgtctctgagcagccagccttcagtagttgagaatgctgattaacatacacataagaggcatgctaattacgggcagccttatcgggtcattacagcaggtcccccaggacctttctgttactgggtagaacttgaaagtaataaatttgcttttctttacaattattctataattagaaattccacagatttaagccattttctcatggaactgcccttattaaacaattgatttttagcaaatatccacacatttcctgatatataatacaaaatagatactgatatgtgtaaaagaaagatggtgaccctattagaaagcatcatcctttttagtttttccacactcattttgatgagaaactttaaaatcccttttagttttttttaatcgatttacgtctgaaggctcatatcgatcttgttctcaatgaaagtcaacatagtattcttaggtcttaggtctagtctttttattcttcgatgaaacagatagaaatttgtctctcctattgatgaaaagattgaagctttaaacagaagggagataccagtaccattttttcaaagaatatgcccatatttaaattgtacaagttttgtttttctgtgagtacaacaatcagatattaaaatggcatgtttttttaacttaaaaagagtattatgtagttattattatgcacgttgatgtggcactttttctcaactgttagagtattcttcttagatatcattaccaaacaactgattggccatttaattttggtcatatttcacttttcctaatacctaaatggcacaaacagacatgaaaatagtgtaaggctcagacttcattgtacctaagaaatcagtgaagcttttcatcaggtggaaggaagagtagactggattttctcttagatctgtctgcctttttctttgaaaagtttgtttgtttgtttgtttttgagacagagtctcactcttgttgcccagactggagtgcaatggcacaatctcggctcactgcaacctccgcctcccaggttcaagcgattctcctgcctcagccttccgagtagctgggattacaggcatgcgccaccacacctggctaattttgtatttttagtagacacggggtttctccatgttagtcaggctggtcgcgaactcccgacctcaggtgatccacccacctcggcctcccaaagtgctgggattacaggcatgagccatcatgcctggcctcttttaaaagtttttgtagttttttccagatgggataactttttacctggataatatatttggtaaaaaacataccattttccaaagtgtttatatcatttcggttgttgttttgacccttctaattatttagcagctctatccatggagactactgggggaagtcttgagttttgcctattcatggaaggcaggaagtaagccagaaggaacctcattccatccccagatttgtttatctgaaagacccatcatcagttgtgaaatgtggaaattttaagcaaggtcttgtatataaattttatagatgggaaaactgttgaaaaaagaaaatgcaactgagagatattactggtatttttgtcattgacaaccaaggataacaattgcattgctcccttgtttgtgatgtatagagacatctatacttaaaagacattttatttgagcaccaaagtaattataaatggtttattgtatttattgtgggatctggccagcagcccgcaatgcagcggggctctctttcttttcccaggcagatcggcaggtcgataaataatagacacacacaagatagtgaaagctgggtccaggagggtcaccgccttctggtcctgcaatgctgccaatgcactggatataccagcatttattattaagtttagtgagggcaggggtaggttagtgagggatttagggttgtttgattataaggtgagatggtcacgtggggatgaagtaattctttaacataacatctgtatgcagaagtacagtatacagagaaaagaatttacagtatagtgtgtgcatcagtaatttctaacagagccttaaaacagaaacacagtctttccgtaacctatgatcagcaagatattaatcagcagtaacagttgcagcaaaagctggttacaaacaatccatagaaacaggatgtgaggctagacaactggttagaccagaaatactcagaagggagtatgccttaaccctaaagaggcctagaagagccatggcaagatgagggcatttatagccctatcttatccacatgaacaggcgcccctcatgcgtccgtttataggctctccacaagggtcacattccctcatgcgtccgtttataggctctccacaagggtcacattccattcccagagctatgaacatctgcttttctgggataggaatcttggtgatgtgaaacctccctgactgcacatccattcataggctctctgcagggggaagcaaatcacacgctgttggctcattctggcagtccaacctggcattgtctttacacaatcctgcatgcaattttatatttacaataatcagaagcatttcatcttttattccatagcagtagtttcagggggtctccctacatatatttataactttttccctatttatttatgctgtttatgtttaagtatggttccctgagagctcacctgatatatcacactgctgaaactgagctagatctctaaagctttctccagatttaacatcctatgattcactgactgtgtaaattaattctaaccactgatgttgaaaatgtcttctcatggatctgtaaaggttatgcagaaaaatctagttgctaaataacggagctatcttcaggaatgaaaactggtaaagaatattattggctgggtgcagtggctcatgcctgtaatcccagtgttttaggaggctgaggtgggaggattgcctgatgcctggagttccagactagcttgggcaacataaccacatcttacataaaacaaaaaacaaaaaactagctgggcattgtggcatgcacctatagtcctagctactttagaagtctgaggtaaggaggaccccttaagcccaggagttagaggttacaatgagctatgatagctccatgatagcaccattacattccagcctgggtgacagagtgagaccctgtctgttagggggaaaaaatacacacacacacacacacacacacacacacacacacacacacacacacacacacattgagagtcagtgatatgtatagtcaatggaagaatttagtcaatataaatatatttatatatatatatagtcaatataaatatgtacatatagtcaatggaagaatttccatacatttttggtccctaagtgtacaacttcactgggttattaaaaatattaaaaaacacctataaagtgcttagaacagtacctggcaaccttgtaagtgctatgttaagtgtttactgttactgccaccaacaccactgaggatccagcagaggattctatgataagttgtctttgtcctaaaaatagtatatcctcttgcagtcattggaaataatatggccagtaatctaaaatatatagtttcctagtagctataggctattttgaagtcattctaaaaccaaccattaaacctgagcgtaatctgtttaacacatgaagaaagctgtttcataagactctgaaagagatttataaaatgaaaatgctgtggcatcaaatattaatattttgctagcagcaggtagcccaaatgttgatggctggtatgcatttgaaggcctacttaactgtgaattttattaggaccattcctcagagctggagttacaaatgggcttataaatgagaaattaaccacccctctagggaacagcagtttctttgaaatcttaattaaccaatcacactgatcttctcttttttcaattgccaacacttggataaatgttgaataaaacattgtctaattggaaatagcttaagtactgggaacaccattcttttatatgttgaaataagtatagtggtaaaatgaaataaattttaaaaagtagtgcatatgtgcctgtttgaatattttcatttgtccactatacttttaaaaaaattaaactgtaaaaaaattacattgtgaaactaggtttttttcttttttctttattgagacagtctcactctgacacccagggaggagtgcagtggtgtgatcaggactcattgcagccttgacctcccaggctcaagcagtcctcctgcctcagcttcctgagtagctgggacaacaggtgcacagtactatgccctgctaattttttgatttttttatagagaggagatctcactattttgccctggctggtttcaaaagcaattttcccaccttggcctctcaaagtgctgggattacaggtgtgagttaccaagcctaggcagaagttgttttttttttaattggaaaataagcataagaaacataggatgtttcatgttcagaaagaccattacttacaatatgactttgtagtatcactttattttcttccacacagaacattacaagtagaggcaacacatttgtgaagaggttaattttaacaaaatataaataaactgatccactgtaaagtgttacctagaaaagatagtttatgtagtggaatggaaatacatatataggtgaaaatttaatgacctttctaattgaattttttgaagaaataaacattgtattttctaagataaattcttctatgttatattattactttattaaaatggatactgcagtcaatatgattttcttaaatttataagaacatagagaagatagttttgtgaacagttaggtctcccttaggcttattatttctttgaaattgttttatttgtgctgtatagttttcatacatatgagactttccaataatagctattgaatggaaaaaatacatatagaacacagtcatttaagtcgctcaaatttctagaaataaaatatggagacctgctttcccaaatatatttgctatgtcctttttcagatttagcaaacattatgccttctatatgccatacacatttgcatagttatatttaatgttgagtacaatgttgtaaactggagatatgtgtttcaagcagaaggaataacatgtaggtacaaagggatttgattataatgagcatggcacgttggatagggtcagagagtttttaatgctaatcagtgggaagggagttggagaccagatgactagtaggctaaaatgatgggttagggcagttcctgttggacattgaatggcaaaggggagtccacaagagtttatattttattcttttgtctgagggtccttgaatgggctttagtccattgtgaatctctttaaattacgtatgtgtatgtgtgttagtatgcatatgcacttgtacgtccgcatccactgaacacacgtgctgtggaaagggtttgtagttttcattagattctgtaattccacaaagttaagaatcactgcagtagatatgacacatcctattagagattctaattatgtgatgatggagtaagaattgttggttgtttgctttttaagaaagatcattttggcagcaagaccacaggtcactatctcacatcatatacaaaaatgaactttaagagctaagactgtgatgctcttcgaagaacacaaaggggtaaatcttcatgactttggatttgttttgttttgttttgagatggaatctcactctgttgcccaagctggagtgcaaggcactatctcagctcactgcaatctctgcctcccaggttcaagcaattctcctgcctcagtctcctgagtagctgggattacagtgtgtgccaccacgcccaactaatttttctatttttggtagagacagggtttcaccatgttggccaggctggtcttgaactcctgacctcaggtgatctgccttgcctcggcctcccaaagtgctgggattacaggcatgagacaccgtggccagccatgactttgtatttaatagtggtttattatatatgaaaccaaaagtacaagcagcaaaatataaaacataaactggacttccttaaaacttaagacttgttgtattaaacgacatcatcaggaaaatgaaaaggcaatctagagaagaggaaatttgcaaatcatatctctgataaagattgagtattcagccatttgacccagcaatcccattactgggtatatgcccaaaggattataaatcgtgctgttataaagacacatgcacacatatgtttattgcggcactattcacaatagcaaagacttggaagcaacccagatgtccaacaatgatagactggattaagaaaatgtggcacatatacaccatggaatactatgcagccataaaaaatgataagttcatgtccttcttagggacatggattaagctggaaaccatcattctcagcaaactatcacaaggacaaaatctaaacactgcatgttctcactcataggtgggaatcgaacaatgagaacacatggacacaggaaggggaacatcacacaccggggcctgctgtggggtgggaggaggggggagggatagcattaggagatatacctgatgttaagtgacgagttaatgggtgcagcgcaccaacatggcacatgtatacatatgtaactaacctgcatgttgtgcacatataccctaaaacttaaagtatagtaaaaaaaaagattgagtattcggaatatatcaataatttttataactcaataaaaatgtaacccaactgaaaaattagaatcaatatttctccaaagagaatatttctccaaagaagacatacaaatggccagctagcacatgaaaagatgcttaacaccattagtcatcagggaaattcaaatgaaaaccacgatgagataccacttcacacccactaatatggctgtaatcaaaaagtcgagtgttggcaaggatgtagagaaattgggacccttatacactgctggttggaatgtcaaaatgctgtagctgccttggaaaacagctgacacttcctcaaaagattagatatatagttaccatatgacccagcaattctatttataggtaaatagccaagagaattgaaagcaaagcaacacaaaaacttctacacaaatctatttagcaacattgttcataatagccaaaaaagtggaaacaaccaaaatgttcataaagtgctgaagaaataactcatccattcatagcacatccaaaacgttatagtcatatgaggaatattactgagcagtaaaaaggaatgaagcattgatgtatgctacaacgtggatgtaccttggaaagatgctaagcgaatgaaatgagtcacaaacactacattttatatgattctgcatatatgagatgttgagaataggcaaatttatttgagatactgaaagtagaggctaccaatggcctctgctttcagtaggagaatcagaattattggagggtgatgacaaaaagatacgatgtttattttggaggtatgaaaatgttttaaacctcgacttgtgacaaatatacaactctgaatatgccaaaagtcatggaattgtacgctttaaacgggtaaattttttcgtatgtgaattttatcttaataaatttattttttaaacaaaaagattatttataatatttctgggagacaaagctcaggtcctgaaataaggtaggagcaatagaagtggagcaatgatgatggatttgagggtcaataataagaaacaacaggtaaaatgttttaaattgctttgacactaaaaggaaggagaatgcatatatggtaattcctagatttctggctagcagggctagatagagaatggtgccattaccacagtggggtaggaatatggaaaggaaagaatggtttggggaaaagatgatgagttattgttttaagtaggctgactttgacttagctgtcggacaaccaggtggaggtgctcagtaggcaatttaacatgtaggtcccagactaggtgaggtagctcacacctgtattcctagccctttgggaggccaaggcaggtggattgtttgagcccaggagtttgataccagtctgggcaacatggcaaaaaacccatctgtacaaaaaaatacaaaatattagctgagtgtggtggcacgctgcactccagcctgggcaacagagtaagacttagaaaaataaaaataaaaaatgtagatctgaagcctagagacatgctttgaaaaaaaatcattagtgaacatcttgaagttgaggctttgtgtatgaaaagctgcaaagagatgagatgaaaatcaggcaagaggtattctggagcccatgaaggaagaggttcaagaagaatggagtggaacctggcagtggtgcgtgcctgtagtcccagctactgaggaggctgaggcgagagaaattacttgagccctggagtttgaggctagtctgggcaacacagcaagaccccatctctttaaaaagagagagagatggagggaatgtttagctttgtcagtcgctgtccacttcatacaatatgagtactgaaaaatatcctttgtgcgtggcaattcagaggtaaccttaatgagcagtttcagtggagtgttgagggtataatctagaagggttcaaaggaggatttctttaaagataggatattgttaggtttataaaagacaaacttgttttccctaatccttttatgccttactactaggactttttcctttaatccaagcatttccaaaccatggtgcttcattgtttagaaatcacatgtgctttaataattcaggttggtttttcttttcttaaccaaaaatagcaatgcaaactatggcgtatgtattatacactttattagggatttcaaattatgtaaatctctaaattaacacacaaaaaggatttatatcagattctatttatgaagtcagaaaaattcctttttccagagccttaactcttatatttcccaagtgcttttatgaagaaacagtcattaaggaaaaaatgactgttttattcagtgaagatttcatgtcatctagttagcaaactatactttgtcttagagtcatttgaaggtagttggacttaacacagacatattgaccaaaattacgatcattatatccttattctatgtccatatgtcagagcccatcttttacagatctctcatgattgccctaaaaattccatttcaagggagtcaaaggctctcttctttcctgcccatctgcatctcctaggaagtgagttttggggctccttgaaattctagtgtgttctaagatagtggtgatcaaactttttttaccctccccatacatatatgtatgtttgcctgtgagtcagatgcaaaagttttcagtaattattctatgagatgctatggtattcactatctcttttttccttttcattctgttatgagctaacatgctgagtagtaggtcataatcatgattcaccaatggagactaaaagttcccatagctcatagaggagtcccaggaatggccatgtatttgctaaaccctaatttgttcaccgtgaattcatcttagaagttttaggtgtgatctggcttcctggtaacatcagaatgctctaggagttgcccagtttccagatactagacttattgcccttgtgctgtagagaaagagcaaaagaattttaggcttaataataccttactatgtttactatgtgtcaggtgctatgattggtatagataatatctaatcttaaaacaattttgaaaattagaattagcatcacaattgtggtgggttagtaggggaaatgaagaaaacaaagcttggcgacattgagtaacttgtctaagagtatacagtgtgtaggtggctttaaaacccgagtttttttcacttccataagctttctgaaacaggcattccattatgaagggtcagcctcagtgcttgtccctattgtgcctaaagaagattgagaaacatggggtggggcggggaagtcccaaaatcatcttggatagcctaagcctttatgcattctcactgcttaaatggagaactctggcaatgtcaacataatcagatcactgccatctcaatacaggattaaataaaattgctctcatattttttggcagtctgtgggtaaaaattatctctgagatctgtacaatcatatgtggagttcatttaagccaaagtctataaagaatgtttaagaccatgcccctgtttgtgctttttactggtgtttctctattagcctggagtgataggatcagtccttgttaattataactgatagggaaacatggctaagaaatatcattcttgggtcaggcacagtgtctcatgcctgcaatcctggtgctttgggaggccaaggcaggaggattgcttgacttcaggagtttaagactagcctgggcaacatagcaagactccatctcaacagtgacatttaaaaattagctaggtgacagagtgagcttctgtgtcaaaaaatatatatatcattcttggtgatgggcttggccactttgtaagaaaccttggtatctcagatgatagatagaagaagcaaaaccgtgagcatttttctctgtaatgtttagttgtgaggccaataaacttaacactcttggaggcaggttttaagaacttcttttctatcattttcttcttccctgtttttactcccctactcaaaagatgtatgtgtatgtgtttttttttttaatccctcctacagagagaaaagcttgtggcaaagggagctaaggtataggatgtagcttctccgttaaaatctagtcctgccctgtccaatgtaataaccactagccacatgtattatcaagcacttaaaatgtgaaaagtcagaattgacaagtgttgtaagtataaaatatttcatactatatttgaaagacttagtattaaaaagagaatgtaaaatattaatagtttttaatatagattacatgttaagataatatttcacattcattgaattaaatgtcattaaaatttctcctgttgctttttactttttaaaatgtggctacagtaaaattttaaattatatatttgtcttgcatttgtggttgtattgtatttctttttgacagtattgattctagggcaatactgcagctactctacccagccatgctttggaatacagctcattatctaattttaggaccccccacccaaagagggctaaattttgcccagccttttcttcctgtccacctgctacctcagcttgaaagagtatatagtgctttactggacaggtaaggcacataaaaataaatcaagttttccccaattggaagtgagaacagatggtcttggatggggtgggacaccagactggtagggcccagatccagtagatttgctgaggatattctgtaaagcaacttgaagaaagtataggaaagttcacatttttcccattatgagtacttcagtggttttgtttttgtttgaaatatcaaattcttccaagacagttttgctccttttcagggcactgtttccctgatgcgctaagcatgtgcttagtctgtgtgatatacttccaaagaccaagcccttgataagtccaccctggagtggtggcatggcaagttgtcaatacctgagccttgggagctatactccttcagtggttggttgactgattgcaggcaaaaagatagaagttgccaatgaaaattgtttcaaaggaagtagtgtatcatgtgtgcatgtctatgtgtgtgtatttattaaagaagattctgcttaaattatttctactttaaaattctctattttaaccattgtggaagacagtgtggtgattccttgaagatttagaaatggaaattccatttaacccagcaatcccattactggatgtatacccaaaggaatataaatcattctattaaaaagatacatgcatgcgtatgttcattgcagcactattcacaataacaaagacatggaatcaatccaaatgcccatcaatgatagactgggtaaagaaaatgtgatacatatacaccattgaatactatgcagccataaaaaggaatgagatcatgtcctttgcagggacatggatgaagctggaagccattatcctcagcaaactaacgcaggaacagaaaaccaaacacctcgtgaacagaaaaccaaacacctcgtgttgtaagtaggagctgaacaatgagaacacatggacacagggagggcaacaatacacactgggacctgtcaggggagggtgggtaggggagagcattagggaaaagagctaacacatgctgagcttaatacctaggtgatgggttgttaagtgcagcaaaccaccatgacacacgtttacctatgtaacaaacctgcacatcctgcacatgtaccccagaacttaagaaaaaaaaatgaaattatttttaaaaattctccgtatgtatatatgtatgtatgtatgtattatttattgagatagagttttactctcattgcccaggctggagtgcaatggcacgatcttggctcactgcaacctccacctcccgagttcaagcaattctcctgcctcagcctcccaagtagctggtattataggcatgcacaccacacccagctaattttgtatttttagtacagacagggtttcaccgtgttggtcagtctgatctcgaactcttggcctcaggtgatccatctgctttggccccccaaagtgctgggattacaggtgtgagccactgtgcctggccaaatgatctgttttaaaaagtacaatatgagtgtgatgttccccttcctgtgtccatgtgttctcattgttcaattcccacctatgagtgagaatatgcggtgtttggttttttgttcttgcgatagtttactgagaatgatggtttccaatttcatccatgtccctacaaaggacatgaactcatcattttttatggctgcatagtattccatggtgtatatgtgccacattttcttaatccagtctatcattgttggacatttgggttggttccaagtctttgctattgtgaataatgccgcaataaacatatgtgtgcatgtgtctttatagcagcatgatttatggtcctttgggtatatacccagtaatgggatggctgggtcaaactgttgtggggtggggggaggggggagggatagcattgggagatatacttaatgttagatgacgagttagtgggtgcagtgcaccagcatggcacatgtatacatatgtaactaacctgcacattgtgcacatgtaccctaaaacttaaagtataataataataaataaaataaaataaaataaaataaaatataaaagtacaatatgagaagaaaaatcacgtcttccaattaaataatatacagttaatcaaagagagagcaagaatttgttcaactgtgtaccattataatcagacactataaagggattccaaaagtttgtgggaaaatgcaattaaaagaataaaataatgtgaacttttcttcccaacataagctccatcagggtcaagacactttccaaataaaaagtaatgagtacatagtaggtatatatatttatggggtacttgagatattttgatacaggcatgcaatgcatgacaataacatcaggggaaatgaggtattcaccatctcaagcatttatttctttgtgttataaacattccaattatactctttagatttatttatttatttattattttttgaaacagagtgtcactttgtcacccagactggagtgcagtggcacaatctcgactcactgcaacctccgcctcctgtgttcaagtgattcttctgcctcagcctcccgagtagttgggactacaggcgtgcacaaccaggcttggctaagttttttgtatttttagtagggacagatttttgcaatgttggcccggctggtctcgaacttctgacctcaagtgatccacccgcctcggcttccaaaagtgctgggattacaggcatgagccaccatgcctggcctatttatttatttatttagagacagtcttgctctgtcacccaggctggaatgtagtggcatgatcttggctcactgcagcctccgcctctggggttcaagtaattctcctgcctcagcctcctgagtagccaagattacaggcatgcaccaccatgcctggctaaattttgtatttttagtagagatgggggtttcatcatgttggccaggctagtctcgaactcctgacctcaggtgatccgcttggctcagcctctcaaaatgttaggattataggcatgagccaccacgcctggcccggcctagttatttttaaatgtacaataaattattgttgactgtagtcactttgttttcctgtcaaataatagatcttattcattctatctaactatatttttgtacccattaaacatctccactttgcccccactactcccgctacccttctcaacctatggtaactatcattatattctccatctccatgaattaattgttttgtttttttagctcccacaaatgagtgagaagattgtctttttctgcctgttttatttcatttaacataatgtcttttagttctatctatgttgttgcaaatgacagaatctcattcttttttatggctgaatagtactccattgtgtacatgtaccacattttctttatccattcatctgttgatgaacacttaggttgcctccaaatcttggctattgcaaatagtaccacagtaaacataggagtgcagatatctcttcaacatagtgacctccattcttttgtgaatatacctagcagtgggattgctggatcatatggtggttctgtttttaattttttgcagaacttctatactgttcttcatagtggttgcactaatttacattcccactaacagtgtacaagagttcccttttctccacatccttgtcagcatttgttattgcctattttttggataaaagccattaaaacttgggtgagatgatatctcattgtagttttaatttccatttctccagtgattgatgatgttgagcacttttttatatacctgtttgatacttgtatttcttcttttgagaaatgtttattcaaatcttttgcccatttttaaattggattattagattttttttctattgagttgttggagctccttatatattccggttgttcatcatttgtcagatgaagtttgcaaatgttgtcttccattttgtagattatctcttcacttcgttgatcatttcctttgctgtgaagaagctttttaacttgttaacttgatatgatctcatttgtccattttttctttggttgcttgtgctcgtggggtattactgaagaaatttttgcccagcttgatgtctttgagagtttccttaatgttttcttgtgttagtttcatagtttgaggacttagatttaagcctttagtccacttttacttgatttttatatatgtcgagagaaaggggtctagtttcattcttctgcatatggattattcagtcttcccagcaccatttattgaagagactctcctttcaacaatgtatgttcttggcatgttgtcaaaaatgagttcaatgtagatgtatggatttacttctggattctttattctgttccattggtctatgtgtttctttttatgccagtcccgtgctgttttggttgcagtagctctgtagtataatttgaagtcaggtaatgtgagttctccagttttgttctttttgtttaggatggcttaggctattccaggtctttcatgggttccatcaaaatttacgattatttatttatatttctgtgaagaatgagattgatactttgattcggattacactgaatctgcacattgctttggacattttaacaatattgattcttctaatccatgaacatggaatatctttccattttttgtgacctcttcagtttcttttttttttttttttttttttttttttgtgagccaaataaacttcttttatttataaattaccatgtctcaggtgttcctttacagcaatttaaaatggactaatacacaaagttaatgctctaacaacttttggttaaataaatgaatatgagactgtaaagttattttttaatacctcctttgttttagatgctgtattgtttttttttctttttttttttatttattttttttttattatactctaagttttagggtacatgtgcacattgtgcaggttagttacatatgtatacatgtgccatgctggtgcgctgcacccactaacgtgtcatctagcattaggtatatctcccaatgctatccctcccccctcccccgaccccaccacagtccccagagtgtgctattccccttcctgtgtccaagtgatctcattgttcaattcccacctatgagtgagaatatgcggtgtttggttttttgttcttgcgatagtttactgagaatgatggtttccaatttcatccatgtccctacaaaggacatgaactcatcattttttatggctgcatagtattccatggtgtatatgtgccacattttcttaatccagtctatcattgttggacatttgggttggttccaagtctttgctattgtgaatagtgccgcaataaacatacgtgtgcatgtgtctttatagcagcatgatttatagtcctttgggtatatacccagtaatgggatggctgggtcaaatggtatttctagttctagatccctgaggaatcgccacactgacttccacaatggttgaactagtttacagtcccaccaacagtgtaaaagtgttcctatttctccacatcctctccagcacctgttgtttcctgactttttaatgatcgccattctaactggtgtgagatgatatctcatagtggttttgatttgcatttctctcatggccagtgatgatgagcatttcttcatgtgttttttggctgcataaatgtcttcttttgagaagtgtctgttcatgtccttcgcccactttttgatggggttgtttgtttttttcttgtaaatttgtttgagttcattgtagattctggatattagccctttgtcagatgagtaggttgcgaaaattttctcccatgttgtaggttgcctgttcactctgatggtagtttcttttgctgtgcagaagctctttagtttaattagatcccatttgtcaattttgtcttttgttgccattgcttttggtgttttggacatgaagtccttgcccacgcctatgtcctgaatggtaatgcctaggttttcttctagggtttttatggttttaggtctaacgtttaaatctttaatccatcttgaattgatttttgtataaggtgtaaggaagggatccagtttcatctttctacatatggctagccagttatcccagcaccatttattaaatagggaatcctttccccattgcttgtttttctcaggtttgtcaaagatcagatagttgtagatatgtggcattatttctgagggctctgttctgttccattgatctatatctctcttttggtaccagtaccatgctgttttggttactgtagccttgtagtatagtttgaagtcaggtagtgtgatgcctccagctttgttcttttggcttaggattgacttggcgatgcgggctcttttttggttccatatgaactttaaagtagttttttccaattctgtgaagaaagtcattggtagcttgatggggatggcattgaatctgtaaattaccttgggcagtatggccattttcacgatattgattcttcctacccatgagcatggaatgttcttccatttgtttgtgtcctcttttatttccttgagcagtggtttgtagttctccttgaagaggtccttcacatcccttgtaagttggattcctaggtattttattctctttgaagcaattgtgaatgggagttgactcatgatttggctctctgtttgtctgttgttggtgtataagaatgcttgtgatttttgtacattgattttgtatcctgagactttgctgaagttgcttatcagcttaaggagattttgggctgagatgatggggttttctagataaacaatcatgtcgtctgcaaacagggacaatttgacttcctcttttcctaattgaataccctttatttccttctcctgcctgattgccctggccagaacttccaacactatgttgaataggagcggtgagagagggcatccctgtcttgtgccagttttcaaagggaatgcttccagtttttgcccattcagtatgatattggctgtgggtttgtcatagatagctcttattattttgaaatacgtcccatcaatacctaatttattgagagtttttagcatgaagggttgttgaattttgtcaaaggctttttctgcatctattgagataatcatgtggtttttgtctttggctctgtttatatgctggattacatttattgatttgcgtatattgaaccagccttgcatcccagggatgaagcccacttgatcatggtggataagctttttgatgtgctgctggattcggtttgccagtattttattgaggatttttgcatcaatgttcatcaaggatattggtctaaaattctctttttgggttgtgtctctgcccggctttggtatcagaatgatgctggcctcataaaatgagttagggaggattccctctttttctattgattggaatagtttcagaatgaatggtaccagttcctccttgtacctctggtagaattcggctgtgaatccatctggtcctggactctttttggttggtaaactattgattattgccacaatttcagagcctgttattggtctattcagagattcaacttcttcctggtttagtcttgggagagtgtatgtgtcgaggaatgtatccatttcttctagattttctagtttatttgcgtagaggtgtttgtagtattctctgatggtagtttgtatttctgtgggatctgtggtgatatcccctttatcattttttattgtgtctatttgattcttctctctttttttctttattagtcttgctagcggtctatcaattttgttgatcctttcaaaaaaccagctcctggattcattgattttttgaagggttttttgtgtctctatttccttcagttctgctctgattttagttatttcttgccttctgctagcttttgaatgtgtttgctcttgcttttctagttcttttaattgtgatgttagggtgtcaattttggatctttcctgctttctcttgtaggcatttagtgctataaatttccctctacacactgctttgaatgcgtcccagagattctggtatgtggtgtctttgttctcgttggtttcaaagaacatctttatttctgccttcatttcgttatgtacccagtagtcattcaggagcaggttgttcagtttccatgtagttgagcggctttgagtgagattcttaatcctgagttctagtttgattgcactgtggtctgagagatagtttgttataatttctgttcttttacatttgctgaggagagctttacttccaactatgtggtcaattttggaataggtgtgatgtggtgctgaaaaaaatgtatattctgttgatttggggtggagagttctgtagatgtctattaggtccgcttggtgcagagctgagttcaattcctgggtatccttgttgactttctgtctcgttgatctgtctaatgttgacagtggggtgttaaagtctcccattattaatgtgtgggagtctaagtctctttgtaggtcactcaggacttgctttatgaatctgggtgctcctgtattgggtgcataaatatttaggatagttagctcctcttgttgaattgatccctttaccattatgtaatggccttctttgtctcttttgatctttgttggtttaaagtctgttttatcagagactaggattgcaacccctgtctttttttgttttccatttgcttggtagatcttcctccatccttttattttgagcctatgtgtgtctctgcacgtgagatgggtttcctgaatacagcacactgatgggtcttgactctttatccaacttgccagtctgtgtcttttaattgcagaatttagtccatttatatttaaagttaatattgttatgtgtgaatttgatcctgtcattatgatgttagctggtgattttgctcattagttgatgcagtttcttcctagtctcgatggtctttacattttggcatgattttgcagcggctggtaccggttgttcctttccatgtttagcgcttccttcaggagctcttttagggcaggcctggtggtgacaaaatctctcagcatttgcttgtctataaagtattttatttctccttcacttatgaagcttagtttggctggatatgaaattctgggttgaaaattcttttctttaagaatgttgaatattggcccccactctcttctggcttgtagggtttctgccgagagatccgctgttagtctgatgggctttcctttgagggtaacccgacctttctctctggctgcccttaacattttttccttcatttcaactttggtgaatctgacaattatgtgtcttggagttgctcttctcgaggagtatctttgtggcgttctctgtatttcctgaatctgaacgttggcctgccttgctagattggggaagttctcctggataatatcctgcagagtgttttccaacttggttccattctccacatcactttgaggtacaccaatcagacgtagatttggtcttttcacatagtcccatatttcttggaggctttgctcatttctttttattcttttttctctaaacttcccttctcgcttcatttcattcatttcatcttccattgctgataccctttcttccagttgatcgcatcggctcctgaggcttctgcattcttcacgtagttctcgagccttggttttcagctccatcagctcctttaagcacttctctgtattggttattctagttatacattcttctaaatttttttcaaagttttcaacttctttgcctttggtttgaatgtcctcccgtagctcagagtaatttgatcgtctgaagccttcttctctcagctcgtcaaaatcattctccatccagctttgttctgttgctggtgaggaactgcgttcctttggaggaggagaggcgctctgcgttttagagtttccagtttttctgttctgttttttccccatctttgtggttttatctacttttggtctttgatgatggtgatgtacagatgggttttcggtgtagatgtcctttctggttgttagttttccttctaacagacaggaccctcagctgcaggtctgttggaataccctgcgatgtgaggtgtcagtgtgcccctgctgggggctgcctcccagttaggctgctcgggggtcaggggtcagggacccacttgaggaggcagtctgcccgttctcagatctccagctgcgtgctgggagaaccactgctctcttcaaagctgtcagacagggacacttaagtctgcagaggttactgctgtctttttgtttgtctgtgccctgcccccagaggtggagcctacagaggcaggcaggcctccttgagctgtggtgggctccacccagttcgagcttccctgctgctttgtttacctaagcaagccttggcaatggcgggcgcccctcccccagcctcgttgccgccttgcagtttgatctcagactgctgtgctagcaatcagcgagattccgtgggcgtaggaccctctgagccaggtgtgggatatagtctcgtggtgcgccgtttcttaagccggtctgaaaagcgcaatattcgggtgggagtgacccgattttccaggtgcgtccgtcacccctttctttgactcggaaagggaactccctgaccccttgcgcttcccaggtgaggcaatgcctcgccctgcttcggctcgcgcacggtgcacacacactggcctgcgcccactgtctggcactccctagtgagatgaacccggtacctcagatggaaatgcagaaatcacccgtcttctgcgtggctcacgctgggagctgtagaccggagctgttcctattcggccatcttggttcctccctcctcttcagtttctttcatcagtgttttgtagttcttattgtacagatctttcacttctttggttaagttattcctagataatttatttgtagctgttgcaaattggattcttaaattttaaatttctttttcagattgttcattgttggcatatttaaatgctattgattttcatatattgattttatatcctgtaattttatgtaatttacttctcagttctaataatttcttgattaagtctttaggtttttctaaatataagattatatcatctgcaaagaaggataatttgacttcttccatttcagtttggatgacctttatttctttatcttatctgattcctttagctaggatttccaggactatgttgaataacggtggtgaaagtgggcatctttgtcttgttccagatcttggaggaaagattttcaggttttacgcatatgtagatgtggttcttttctatatggcttttattgtgtgttgaagtatgtttcttctctatccagtttttttaggtttttttaaatttaatcatgaagagatggtgaattttattgaatggtttttttgtatcaattgaaatgatcatatggtctacgtccttcattctttttatatgatgtttatattgattgatttgcatatgttgaaccatccttacatcctggggataaatctcagttgatcatgatgaatgatgtttttaatgtgttgttgaatttggtttgctagtattttgttgaggattttttgtatcaatgttcgtcagaaatgttggcctggaattttctttttttgatgtgtctttgtctggttttgttatcagggtaatactgccctcatagaatgagtttggaagtattcactcctccattattttttggaatagtttgaataggattgatattagttcttcaaatgttttgtaaaattctgcagtgaagccatcattttctgggacttttcttgataggagactttttattacatctcagtctcattacttgttaagggtctattcgagtttttaattttttcctggttcaatcttggtaggttatatgtgtctaggaatttgtccatttcttctaggttttctgatttattggcatatggttgttgatagtagcttctaatgatctttgaatttctgtggaatcagttgtaatttttttttaatctctgattttatttatttgtcttctctctttttttcttaatcttcctacaggtttgttgattttgttttcaaaaaacttttcgaacttttcgaaaaatttttcaaaaaactaaccttttgttaatcttgtgtattgttctttttctctttccaatttcatttatttctgctttcatcttagttatttctttgttctacattttaatgtaggcacttactggtataaactttgctctcagtattgctttcactgtattccagagatattggtgtgttgggtttccattttaatttgttttaaggaatttttgaatttccttcttaatttcttcattgactcactggtcattcagcagcatagtgtttaatttctatgtgtttgtatagtttccaacattcctcttgttgttgatttctagttttattccattgtggtctgagaagataattgatatgatttcaggttttaaaaacattttaggccaggtgtggtggctcacggctgtaatcccagaactttgagaggccgatgggggcagatcacgaggtcaggagatcaaggctatcctggccaacatgggaaaaccccatctctactaaaatacaaaaattagctgggcatgttggtgcatgcctgtagtcccagctacttgggaggctgaggcaggggaatcccttgaacccgggaggcggaggttgcagtgagccgagatcgcatcactgcactccagcctggcagcagagtgagactctgtctcaaaaaaaaaaaaaaaaaaaaatggtctgtctttgagatctatgcactgaggagaagcatatgtattctgcagctgctggatgaaatatctattaggtccatttggtttatagtgctaagtccaatttttttgttgatttttcagtctggatgatctgtccagtgctgaaagtggtatgttgaagtctccaactattactgtattggggtctatctctttcttagctataataatatttgctttatatatctgggtgcttcagtgttgatgcatataaatttataactatttatccttttgtcgaattgacccctttatcattatataatgaccttttggtctcttttcatagtttttaatattgaattctattttatctgatataagtgtagctactcctttttttggttttcatttgcatggaatatcttttcccattcctttatttttagtctatgtgtgtctttattgatgaaatatttcttgtagccaaaagatcattgggtcttttttttatttttttaatccattcagccactccatttcttttgattggagactttagttcacttacattcaatattgttattgataaactaaggacctactcctgctattttgctgtttgttttctggttgccttatgatctttctccctccctccctccctttctctctccttcccttccttccttttcccgttctgttgtttttgtgaaggttctcctctctgatggtgttttaatttcttgccatttttgtgtgtttgtatctgttgtaggtatttcagggttaccacaaggcttgcaaataacattttgtaaccaatcatttaaaactaatgacaacttaacactgcttgtaaaaccaaacgaaaaagcagaaggaaaactaataaaaattcacacttttattcatctctcccactttttaacttcttgttgtttctatttaaatcttattacactatctcttaaaacactgttgtagttatttttgatagttttatcttttgatctttatatggaagatataagtagtttacagaccactgttacagtgttatcatattctgtatttgtctatgtacttcctattagcagtgagttttggacctccagatgatttctttttgcccattaacatcattccctttctgattgaagtacatcatttagcttttcttgtaggataggtcagcaattaatgaaatccctcagtttttgtttgtctgggaaagtctttatttcttctgcatatttgaagtatattttcactggataaaagtttttttttccttcagcacttaaaatatgtcatgccactctcctgttttgtagggtttccactgagaagtctgcagccaaacttagtggagctccattgtatgttatttgtttcttttcttttgttgcttttaggattgtttctttatctttgacctttgggagtttgattattgaatgccctgaggtagtcttctttgggttaaatctgcttggtgttttataaccttcttgtacttgaatattgatatctttctctaggtttggaatgttttctgttattatctctttgaataatgctgtctaccctggtctacctctcactacctcctctttaaggccccatgtattagtctgttttcatgctgctgataaagacatacccaagactgggaagaaaaagaggtttaattggacttacagttcgacatggctgaggaggcctcagaatcatggtgggagacgaaaggcacttcttatatggcagcagcaagagaaaatgagaaagaagcaaaagcagaaacccctgataaacccagcagatcttgtgagacttattcactatacaagaatagcacgggaaagaccatcccccatgattcaatcacctccacctgggtccctcccacaataacgtgggaattctgggagatacaattcaagttgagatttgaatggggagacagccaaaccatatctttctgcccctggcccttccaaatttcatgtcctcacatttcagtaccaatcatgccttcccaacagtcccgcaaagtcttaacttatttcatcattaacccaaaagtccacagtccaaagtctcatctgagacaaggcaagtgccttccacctatgagtctgtaaaatcaaaagcaagctagttacttcctagatacaatggggtacaggtattaggtaaatacatcctttccaaatgggagaaattggccaaaaaaaaggagttacagggcccatgcaagtccaaaatccagtgaggcagtcaaattttaaggctccaaaatgatctcctttgactccacgtctcttatccaggtcacactgatgcaagaggtgggttcccatcatcttgggtagctccacccctgtggctttgcagagtacagcctcccttctggctgccttcacaggctggtgtttagtgtctgcagcttttccaggcacatggtgcaaactgtccgtggatctaccattctggggtctggagtatggtggccctattctcacaactccactaggcagtccccctgtgggcactgcctgtgttgggactttgactccacatttcccttccgcactgccctatcagaggttccccatgagggccccaccctgaagcaaacttttgtctgggcatccaggcatttccatacatcttctgaaatctaggtggaggttcccaaacctcaattcttgactttggtgcacccgcaggctcaacaccacatggaagctgccaaggtttggagcttccaccctctgaagccacagcctgagctgtacattggcccctttcagccagggctggagtggctgggacacagggaaccaagtccctaggccgcacgcagcacaggtaaccctgggcccagcccacaaaactactttttcctccggggcctccaggcctgtgatgggaggggctgctgcgaaggtctctgacatggcctggagacattttccccatggtcttgggaattaacattaggctccttgctacttatgcaaatttctgtagccagcttgaatttctccccagaaaaatgggtttttccaaacactgcatgttctcactcataggtgggaattgaacaatgaaaacacttggacatagggtggggaacatcacaccccggggcctgtcgtggggttgggggcagggggagggatagcattaggagaaatacctaatgtaaatgacgagttaatgggtgcagcaaaccaacatggcatatgtacacctatgtaacaaacctgcacattgtgcgcatgtaccctagaacttaaagtataatttaaaaataaaataaataaataagaaaaatgggtttttcttttctactgcattaggctgcaaattttctgaacttttatgctctgtttcccttttaaaacagaatgcttttaaaagcacccaagtcacgttttgaatgctttgctgcttagaaatttcttctgctagataccctaaatcatctatctcaagttcaaagttccacaaatctctagggcagggacgaaatgccaccagtttttttgctgaaacataataagagtcacctttgccccatttcccaacaagttcctcatctctacctgagaccacgtaagcctggaccttattgtccatatcactctcaggcttttggtcaaagctattcaacaagtctctgggaagttccaaactttcccacattttcccatcttcttctgagcccaccaaactgttccaacctctacctgttacccagttccaaagtcacttccatattttcgggtatcttttcgtcaacgccccactctatgggtaccaatttactctattagtctgtttttatgctgctaataaagacatacctgagacttggaagaaaaagaggtttaattggacttacagttccacattgctgagaaggcctcagaatcgctgggaggctaaaggcacctcttaagtggcagcagcaagagaaaatgagaatgaagcaaaagcggaaacccctgataaacccgttagatctcgtgagacttattcactacaccagaatagcaggggaaactcgtgagacttattcactctgcaagaatagcagaggaaagaccacacccccatgattcaattacctccacctgggttcctcccacaacacgtggaaattctgggagatgcaattcaagttgagatttgaatggggacacagtcagactatatcaggccagtaactcatagatttgcctttttgagcctattatttagatcttgtaggcatgctccattgttttttattattattttttgccttttctgactatttattttcagatacatgtcttcaagctctctaattctttcttcttcttgatcagttcgactattgagagactgatacattcttcagtgtgtccattgaatttttcagctccagaatttctgcttgatatttaaaacttattgtaatctctttgttaaatttctctgataggattctgaattctttttctgtgttgtcttgaagtttgttgtgcttcttcaaaataggtattttgaattctcttgtctgaaaagccactatctctgtttctccaggattggtccttggtgccttacttagttcatttttgaggtcatgttttcctggatggtgttgatgcttatagatgtttgttagagtctggacattgaagagttaggtatttgttttattgtttgcagcctgggcttgtttgttcctgtctttttggagaagattttccaagcattctgaaggaattgagtattgtggcctaagtctttgatcactacagctatatctgcattagggggcatctcaaaccagtaacactatgactcttgcagacttgtcaagatcaccttgatgttctttgataagatccaagataattttctggaacaagaggcaaagactcttgttctctttctttactttctccaaagcagacagagtctccgtctccatcctgagctgcctggtattggcaaaggggtgacacaagcacctggtggctaccatcacttggactgtggtgagtcagacccgaatccagcacagtactgggtcttgtccaaatccggaggcgaccactgcctggtaattgccaatcttcattcaaggccagaactgccattcgggaaccagggccaggaatcaggaaccttaggattctacctcctgctctattctactccacctaagctggcacccccaccacaagacaaagtctttcccactcttttctcttctttcctcaagtataaagagcctgttgtaatggccaccacagctggtattgtgctgggtcacatctgaagccagcacagcactagttctcacccaaagcccacagcaactaccgcctggttacaactgatgtttattcaaggcccatgcagatgatgaatgccgccagaactgggttctcccctacaaggcagcaggttcccttctggcccaggatgtgtctagaaatgtcatcccgagctagatcctgggatgtgggcctcaggacactgcttggtgccctattctactgtggctaagctggtgtgctaattgcaagacaaagtcctttttactctcccctctcctctcctcaagcagaaggaaggagtttcttctggagctgtgagctgtgctgccttgtgttggcgaagagctgacacaagtactcctgggctggcctagctggtgtcttatagcttgtgtgtaccccatgtcctctggctcagggtccagcacagcaccaagacttgaccaggaattgcagtccttgtggcctagactgcctttcatgtttatttaggaccccaaagcactttagttcacagtcggcctagctggaactcagataccaaccactgggaaggatgattcccctctggctgtgactggtctaaatgctccctccattggcactggctgaattctgccatgtgtttcttttgctgtgacagatagcactgagttccaaagcaaagtcccacaatcactgtcctctccctctgcctatcacacatactgtctctctgtgccatgcagctaatgctaggggatagaggtgatgttgttggcaattcaagactgtcttttctaccctcttcagtgcctttttccttgatatgatgttaaaaccaggcactgtgattgtgtacctgatttttgattctcatgaaggtgcttcattatgtggatagttgttcgatttggtattcctgtggaggggataatcattagaggattctattcagccatcttgctccaccaccttctctccagacacttttgtaagtgatgataccagtcatttagtccatccctaaaaaactgaggattctgggaatttaccatgtcaatgccatctttgtaagattattacctaagaaaaatgggtgctctttactttaagagtagaaaacaaaaagaagtcagaagtagccacatcaggactgtaaggtggatgcttaataatgtttcatcaaaactcttgtaaaattaggctgggtacagtggctcacaactgtaatcctaacacttcgggaggctgaggcaggcatatcacttgaggtcaggatttcaccagcctggccaacattgtgaaacccactctctaccaaaaatacaaaaatttgctgggcgtggtggcacatacctgtaatcctagcttctcaggttgctgaggcaggagaattgtttgagcctgggaggcagaggttgcagtgagctgagatcacaccattgcactccagcatgggcaacagagtgagaccctgtctcaaaaccaaaccaaaacaaacaaacaaacaaacaaacaaacgaaactcctcctgtaaaactgaccttgtttgatgggaggaatgagcaggaacacttgtcatggtgaggagggaccctctgatgaagctttcctaggcatttttctgctaaatctttgactaagtgtctcaaaatgctatcataagcagatgttattctttatctctcccagaaagtcaacaagcaaaatggcttgagcatctcaaacacctgttgccatgatctttgctcttgactggtttacttttgcttttactggaccacttcctcctcctggtagctattgctttgattatgctttgtcttcaggattatacttgtaaagccttttttttttaatctcctattacaattcttcgaagaaatgcttcagattttgattccacttgttcaaaatttaattgaaatctctgttgttgtctgaagcggatctggtcacaaaagttttggcacccatcacatggaatatttactcaactttaatttttagtcagatctatataagctgaaccaattgagatgtctgtggtgttggcttttgtttctgcaattaattgttgggccctttcaattagagcacaaacaagataattttgttcttgcaaattgatatggatggactgccactgcaggcttcatctttaacatcatctcattccttcttaaagcgaattttctatttgtaaattgatgatttatttgggggcattgtcctcataaacttttcataaagcatgattgatttcaccattcttacactcagtcttcaccctgaatttgatgtttgttcttgcttcaattttggtggaattaatgttgcactgaaaggggctcttttcaaatttatgttttattcttcttagtgcctcagactagatcctatttagacatgttataacaagttagggagaatttattttggtgcaaatttttttgacattcatgcatagcttttaataatgtacactatccatcaacattttgaagactcctcatatagtatctactagtttatgaaatttcaataaaaatttaaaaccttcagaaaaataattacaaatggctaagtgtagatgttaattgtttaaaatatgcaactcataaattttgatttttcctgaattcatagctgtatataaaggtgcttgtccctagcctgccacacccactgtctttcagattgtgccctgatactccttcacatcattatttgcaatgacaatactagagaaataaattgtccattgataaggcataccacgggtttatttcattatgccaattttaaagctactttcttctgtgaccagaacattttttaagacgttaattggttggtctttatttggcatttgatcagaggagagacagtgttgacaaagcagacattttcagtatctttgtcatttattcactagcgggaatctttatctgttctctgccttcatgtctttggtaacctcagaccagtctggtatatcttaatttgatcttgttttccaagccaaaattcagtttttctgtgcctcacaggcttagtattctcactaatgatgatgtctatccattgttatctcaaagtcctcattttcctctgtcttacagctgagatcagatttttctgattctattcatagcagtatctgtagcttttaactagtatttttgcctcttaattaaataaatgtaacacagctagcgtctgaagtaaaatgtgactagtttatattaaatatggtaactttcataaataaatattaaaacctgtttaatcaagaataaaacccaagtatttatgaagatacttgggaattgcttttcccaacactatgatattagtaatctgggtaggactgccagatgtagcaaataaaaatacaagacacccacttacatttttgtttcatataattaaggactaatttttaatatcagtatgttcaatgcagtattaaattccatgtggtttcactgggcattttatattttaactgtcacccctaaattttcttcataggggcattgattcttgtagtagttgccctactgaaatccttcagtaaaatagaaacaaagagctaacaagttatgaattcttttcatgaaatattatcatgccctccacttatgtaatctttttcccccatcactttgccaaagttgccttcagtctctacgggcagtggtcctgtggtgttgcaatacctgctctcagagggtagggccagaccactcttttgccccacttagcccagtctcatctccatctctccctaactgttgggttacagacattcctctggtggcaaaagcagaggtgtcctctgggctgatacccaggatcacaatgctgcatctttgttgtttaaagactcaaaatcagccaccactcctttgtgctctctgtggctctcaaatttgctgcatttgtgaaaaattatctggtttacactattccagttttatttcagggctgtatcacttacattaggagattgaatacaatatcacagccatgattttcaggaaatactaacttggaagagtgttatttccagtggctatttggataattggagcataacatcctcttcataaagcattttagcctaggctgagttgaataaagatttaagcaaaatgtgtgttttagaaacctgtgtaaaagcttctttggttattctttcctatacatcaggaagatagtattgagaactacagtgtgatgacttgctctagggttacctccaagcaacccttacgaaagtgtgattttgaacaatgagataatttgtttcatgtgggtacaaatgtcgtgaatcatggcattgattatgggagtagttccattggataacattctgccttacaatggattttataaactctcttcctagggagacagctcaaagcatttcgcagggcagatgtgagtgcccaacaaagaaaaatttgccccatcctagctttcatatgtgcctaagtgtgaggcatgactcaccttccacttaagcagcaatataacctttttcttcatactctgcctttctgccttggttcaccattttcttctttctatcatatggatcgtttataataataattattcaacaaatatttgttcagcccctactacatttagggtactagatgtgttactataaggtgctgcctgtagtggccaggagcttatctttcagttagtggaagtaagatatgtcttagcccaaggcaatatgtaaaaaagtattatataagtatatacaacttggtattacagtaagtaacataagggaaaaaggtgtttttacctgggtgttttacattatgaaagcactatggaaggaatctgatgatctgtatagatgagcaagatttcagtaggggaaaatgtgggatggaggatcattcagacagaggaaattacacaaaagccttgaagcttaaagaaaagcacaactttgcagaatggaatgtgattcagatggaatggaataagtcctttttttctatttgagggtaacgggacaatattacagatggatttgaatggtatatgggaacaaaatagtgcttcaggtagattaacctaaaagtactgtacagactgattgaagggcagaaagtttaggaaattgattatttgaaatagtttaggcataaagtgataatatcctgacctattaaaagatggtagtgccaaaaaagaacacatggtttagctggcccaaacaatggttagtttgtctacttagacaatatattgaataatattctctatttttcataatattttcatattgtgaactacttaacacttataccgaattacctcaacactaataatattttcatattgtgaactacttaacacttatgcctaattaccttaacacttataactaatcactatgcaaagtaagaacagtcttgtatatgtaatttgttatcaaccacttaaaactttggaaaaatgaaagagtttttatttgtagaactggttctaaataaaaaggcaaggccagacaaatacctggaaagaaaccttctcttagccctagagccactgaatcaagtcaaaataccttccacaaatggcaacttaatacttaaggaataagtgaagttacttttacagtttcttaacagcagttgcattttctttctttttattacaaattcagactttaaaattgttctcttagctgcatgagagtcaattaggaaaaagttacataaaaatcattgttcctcatgacatacatatcaaaagcaaaaatgtatattgattaaaggggtagaagggaatttcaaacgagaggaggactgtaaccataaactgtttctgtctcatatggtattaagaacagcaaagaacctgagcctgttaagcactataatccagaggtacactgaatgggaattttctgatccttacctaaccttcatgtcaatctactacttcaagctatttttctgtgaaaaagttaacatgtaaactaagacagatacctgagatttaaaaacaaaatctattgtaatttgcttctaacagtgttttatacaccttaattatgtaattcatctgtcactttaataagagtgattttaaaataatgcagggattgaatgtatctttatcttttgtacttcttttcatataaaatgaagtaaagctcaatgagcaaaccccaaacagttttttaaattattttggatgaatcaaataatagtaggattttccatttctgttttaagatagagatccattttgttttgttcatagtttatataatatgtaaaattatttttatatatcatctttgatattagaaaagacattttggtatgcgttttttttttctttttttaaatttattttattattattatattttaagttttagggtacatgtggacaatgtgcaggttagttacatatgtatacatgtgccatgctggtgtgctgcacccattaactcgtcatttagcattaggtatatctcctaatgctatcccttccccctccccccaccccacaacagtccccagagtgtgatgttccccttcctgtgtccatgtgttctcatagttcaattcccacctatgagtgagaacatgcagtgtttggttttttgtccttgtgatagtttactgagaatgatgatttccaatttcatccatgtccctacaaaggacatgaactcatcattttttatggctgcatagtattccatggtgtatatgtgccacattttcttaatccagtctatcattgttggacatttgggttggttccaagtctttgctattgtgaatagtggacaataaacatacgtgtgcacgtgtctttatagcagcatgatttatagtcctttgggtatatacccagtaatgggatggctgggtcaaatggtatttctagttctagatccctgaggaatcgccacactgacttccacaatggttgaactagattacagtcccaccaacagtgtaaaagtattcctatttctccacatcctctccagcacctgttctttcctgactttttaatgatcaccattctaactggtgtgagatagtatctcattgtggttttgatttgcatttctctgatggccagtgatgatgagcattttttcatgtgttttttggctgcataaatgtcttcttttgagaagtgtctgttcatgtcctttgcctattttttgatggggttgtttgtttttttcttgtaaatttgtttgagttcattgtagattctggatattagccctttgtcagatgagtaggttgcgaaaattttctcccattctgtaggttgcctgttcactctgatggtagtttcttttgctgtgcagaagctctttagtttaattagatcccatttgtcaattttggcttttgttgccattactttttgtgttttagacatgaagtccttgcccatgcctatgtcctgaatggtattgcctaggttttcttctagggtttttatggttttaggtctaacatttaagtcttttatccatcttgaattaatttttgtataaggtgtaaggaagggatccagtttcagctttctacacatggctagccagttttcccagcaccatttattaaatagggaatcctttccccattgcttgtttttctcaggtttgtcaaaaatcagatagttgtagatatgtggtgttacttctgagggctctgttctgttccattggtctatatctctcttttggtaccactaccatgctgttttggttactgtagccttgtagtatagtttgaagtcaggtagcatgatgcctccagctttgttcttttggcttaggattgacttggcgatgcgggctcttttttggttccatatgaactttaaagtagttttttccaattctgtgaagaaagtcattggtagcttgatggggatggcattgaatctataaattaccttgggcagtatggccattttcacgatattgattcttcctacccatgagcatggaatgttcttccatttgtttgtatcctcttttatttccttgagcagtggtttgtagttctccttgaagaggtccttcacgtcccttttaagttggattcccaggtattttattctccttgaagcaattgtgaatgggagttcactcatgatttggctctctgtttgtctgttattggtgtttaagaatgcttgtgatttttgcacattgattttgtttcctgagactttgctgaagttgcttatcagcttaaggagattttgggctgagacattggggtttctagatatacaatcatgtcatctgcaaacagggacaatttgatttcctcttttcctaattgaataccctttatttccttctcctgcctaattgccctggccagaacttctaacactatgttgaataggagtggtgagagagggcatccctgtcttgcacctgttttcaaagggaatgcttccagtttttgcccattcagtatgatattggctgtgggtctgtcatagatagctcttattattttgagatatgtcccatcaatacctaatttattgagagtttttagcatgaagcattgttgaattttgtcaaaggccttttctgcatctaatgagataatcatgtgatttttatctttggttctgtttatatgctggattacatttattgatttgtgtatattgaaccagccttgcatcccagggatgaagcccacttgatcatggtggataagctttttgatgtgctgctggattcggtttgccagtattttattcaggatttttgcatcaatgttcaccaaggatattggtctaaaattctcttttttggttgtgtctctgcccggctttggtatcaggatgatgctggcctcataaaatgagttagggaggattccctctttttctattgattggaatagtttcagaaggaatggtaccagttactccttgtacctctggtagaattcggctgtgaatccatctggtcctggactctttttgattggtaagctattgattattgccacaatttcagagcctgttattggtctattcagagattcaacttcttcctggtttagtcttgggagagtgtacgtgtcaaggaatgtatccatttcttctagattttctagtttatttgcgtagaggtatttgtagtattctctgatggtagtttgtatttctgtgggatcggtggtgatatcccctttatcattttttattgcgtctatttgattcttctctcttttcttctttattagtcttgctagtggtctatcaattttgttgatcctttcaaaaaaccaggtcctagattcattaattttttgaagggttttttgtgtctctatttccttcagttctgctctgattttagttatttcttgccttctgctagcttttgaatgtgtttgctcttgcttttctagttcttttaattgtgatgttagggtgtcaattttggatctttcctgctttctcttgtgggcatttagtgctataaatttccctctacacagtgctttgaatgtgtcccagagattctggtatgttgtgtctttgttctcgttggtttcaaagtacatctttatttctgccttcattttgttatgtacccagtagtcattcaggagcaggttgttcagtttccatgtagttgagtgattttgagtgagtttcttaatcctgagttctagtttgattgcactgtggtctgagagacagtttgttttaatttctgttcttttacatttgctgaggagagctttacttccaactatgtggtcaattttggaataggtgtggtttggtgctgaaaagaatgtatattctgttgatttggggtggagagttctgcagatggctgttaggtctgcttggtgcagagctgagttcaattcctggatatccttgttaactttctgtctcattgatctgtctaatgttgacagtggggtgttaaagtctcccattattattgtgtgggagtctaagtctctttgtaggttactcaggacttgcattatgaatctgggtgctcctgtattgggtgcatatatatttaggatagttagctcttcctgttgaattgatccctttaccattatgtaatggccttctttgtctcttttgatctttgttggtgtaaagtctgttttatcagagactaggattgcaacccctgcctttttttgttttccatttgcttggtagatcttcctccatccctttattttgagcctatgtgtgtctctgcacatgagatgggtttcctgaatacagcacactgatgggtcttgactctttatccaatttgccagtctgtgtcttttaattggagcatttattccatttacatgtaaagttaatattgttatgtgtgaatttgatcctgtcattatgatgttagctggtgattttgcttgttagttgatgcagtttcttcctagcctcgatggtctttacaatttggcatgattttgcagtggctggtaccggttgttcctttccatgtttagcgcttccttcaggagctcttttagggcaggcctggtggtgacaaaatctctcagcatttgcttgtctgtaaaggagtttatttctccttcacttatgaaacttagtttggctggatatgaaattctgggttgaaaattcttttctttaagaatgttgaatattggcccccactctcttctggcttcccccactctcttctggcttgtagactttctgccgagagatctgctgttagactgatgggcttccctttgtgggtaacccaaccttcctctctggctgcccttaacattttttccttcatttcagctttggtgaatctgacatttatgtggcttggagttgctcttcttgaggagtatctttgtggcattctctgtatttcctgaatctgaatgttggcctgccttgctagattggggaagttctcctgaataacatcctgcagagtgttttccaacttggttccattctccccgtcactttcaggtacaccaatcagacgtagatttggtcttttcacatagtcccatatttcttggaggctttgctcatttctttttattcttttttctctaaacttcccttcttgcttcatttcattcatttgatcttccatcactgataccctttcttccagttgatcgtatcggctcctgaggcttctgcattcttcacgtagttctcgagccttggctttcagctccatcagctcctttaagcacttctctatattggttattctagttatacatttgtctaaatttttttcaaagttattaacttctttgcctttggtttgaatttcatcctgtagctcggagtagtttgatcgtctgaagccttcttctctcaactcgtcaaagtcattctccatcctgctttgtttcgttgctggtgaggaactgcgttcctttggaggagaagaggtgctctgctttttacagtttccagtttttctgctctgttttttccccatctttgtggttttatctacttttggtctttgatgatggttatgtacagatgggtttttggtgtggatgtcctgttttgttagttttccttctaacagacaggaccctcagctgcaggtcttttggggtttgctggatgtccactccagaccctatttgcctgggtatcagcagcagtggctgcagaactgcggattttcgtgaaccacaaatgctgctgtctgatcgttactctggaagttttgtctcagaggagtaccctgccatgtcaggtgtcggtctgcccctacttgggggtgcctcccagttaggcttctcaggggtcaggggtcagggacccaattgaggaggcattctgtccattctcagatctccagctgtgtgctgagagaaccactgctgtcttcaaagctgtcagacagggacatttaagtctgtggaggttactgctgtcttgttgtttgtgtgtgccctgcccccagaggtggagcctacagaggcaggcaggcctccttgagctgtggtgggctccatccagttcgagcttcccggctgctttgtttacctaagcaagcctgggcaatggtgggcgcccctcccccagcctcgctgccgccttgcagtttgatctccgactgttgtgctagcaatcagcgagactccgtgggtgtaggaccctccgagccaggtgcaggatataatctcctggtgcgccgttttttaagcccgttggaaaagtgcagtattcgggtgggagttacccgattttccaggtgccgtctgtcacccctttctttggctagcaaagggaactccctgaccccttgcacttcctgagtgaggcaatgtcttgccctgctttggctcgcacacagtgcgctgcacccactgtcctgtgcccactgtctggcactccctagtgcatgaacctggtacctcagatggaaatgcagaaatcacctgtcttctgcgtcgctcatgctaggagctgtagacagagctgttcctattcggccattttgggtgccccccgttggtatgcggtttgctgtgaaattttggtttggaagtctgtgaatccttgtcattatctttggttatggtacaaattattagcttttgctactcctgttgtctaaatgatgttgggagagaatttaaacttcaaagcaaacattttaaaacttgagtctgtctccatcttggggaatagatggttaccctgcctgcttctctaattctgatttattcagtactcatttacctagtgcctactaaagtctcaggcaccagggaaacaaagtaaataagaattggtcatggtcgacctagaggtggcaatcaaatgggggtattcagacatggacactagttaattaaaatagcagagtgaaagcctagaggacgaattgattaagtgaggaaaagggagacaagacttccaaaataattatttgtatgtcagcttagtgatgggagtggaagttcactccattgcggttgagaataaaaaggatacttgactatgtggataattctgaattgagttttatacttcagttttaaatgtggaatgaaagttctgttagaccagtaattctcaagtaacagtttgtggccttttgctggtggctacatagacacttgttaaaaatgcagactgcctggaggtactatgttctgaaaaagcatctcacgtgattcttataattagtaaggtatgacacctactttaataaagatccaggagagataaaataaatggtagttgaagtcacaggaatggataagatttcccttgaaagtgtggagagtaagcaaagcagaagacaagaagtaagtagagaaggagccagcaaaggaactaaaaaggaatatactgtgtccagcagctaggatgtatatttacctgagtcttccagttcttagaatggtaatcctcatttctgaattgatatatagagaaaaaatgtagaagaaaaatctctagactgctatttatgatttggctttattctaaaagggattaatcaagtttcagctttgccctatctccaaatattatgcctacttctggaggaagtataatcacaaaatctgtagcagaaacagcaactgaccctctcgaatagtgaaaaatgaagaaagtagagtatcaggaaagaaagttgtaatattaaccaggctttgtaaaacaaaaaatgctccatcatacagttactggatggaatgaggatatttaatttactgaagtgacctttataattgagaactagaactgttatagtctctcaggaacaaatccttctgttcttagccattcctattcttttgtattgatgttgttgtgatccatgcatcttctacttttaggtaactaaaaccttatgttaatggaaatgtgctgttataaaagggcatacaatggcaattatataacctgaattggcataaaaattaattgtctttttcaaaatccacatccccagatagaatacctgttgatcctgaaggatttttaaaacatatacattaccagggggtgcagccaagaggccaaataggaacagctccagtctacatctcccagcgtgagcgacgcagaagacgggtgatttcgcatttccaacagaagcactgggttcatctcactggagagtgtcagaaaatgggtgcaggacagtgggtgcagctagtcaaagaaaggggtgacatatggcacctggaaaatcgggtcactcccacccgaatactgcacttttccaatggtcttagcaaatggcacacctttagattatagcccgcgcctggcttggagggtcctatgcccacggagcctcactcattgctagcacaggagtctcagatcaaactgcaaggcagcagcgaggctgtgggaggggcgcccgccattgctgaggcttgagtaggtaaacaaagcggctgggaagctcgaactgagtggagcccaccgcagcttaaggaggcctgcttacctctgtagactccacctctgggggcacagcatagccaaacaaaaggcagcagattcctcagcagacttaaatgtccctgtctgaccgctttgaagagagtaatggttctcccagcacgcagctggagatctgagaatggacagactgcctcctcaagtgggtctctgacccacgcgtagcctaactgggaggcaccctgcagtaggggcagactgacatctcacacggccgagtactcctctgagacaaaacttccagaggaatgatcaggcagcaacatttgctgttcaccaatatctgctgttctgcagccaccactgctgatacccaggcaaacagggactggagtggaactcccacaaactccaatagacctgcagctgagggtcctgactgttagaagaaaaactaacaaacagaaaggacatccacaccaaaaccccatctatacgtcaccatcatcaaagaccaaaggtagataaaaccacaaagatggggaaaaaacagagcagaaaaaatggaaactctaaaagtcagagtgcctctcctcctccaaaaacgcagctcctcagcagcaatggaactaagctggatggagaatgactttgacgagttgagagaagaaggcttcagacgatcaagctactccaagctacaggacgaaattcaaaccaaaggcaaagaagttaaaaactttgaaaaaaatttagacgaatgtataactagaataaccaatacagagaagtgcttaaaggagctgatggagctgaaaacgaagacatgagaactacgtgacgaatgcacaagcctcagtagccgatttgatcaactggaagaaagggtatcagtgatggaaaatcaaatgaatgaaatgaagcgagaagagaagtttagagaaaaaagaataaaaagaaatgaacaaagcctccaagaaatatgggactatgtgaaacgaccaaatctacgtgtgacaggtgtacctgaaagcgacggggagaatggaaccaagttggaaaacactctgcaggatattatccaggagaacttccccaatctagcaaggcaggcaacattcagattcaggaaatatagagaatgccacaaagatactcctcgagaagagcaactctaagacacataattgtcagattcaccacagtggaaatgaaggaaaaaatgttaagggcagccagagaggaaggttgggttacccacaaagggaagcccatcagactaacagcagatctctcggcagaaagtctacaagccagaagagagtgggggccaatattcaacattcttaaagaaaagaattttcagcccagaatttcatatccagccaaactaagcttcataagtgaaggagaaataaactcctttacagacaagcaaatgctgagagattttgtcaccaccaggcctgccctaaaagagctcctgaaggaagcgctaaacatggaaaggaacaaacagtaccagccactgcaaaatcatgccaaattgtaaagaccatcgaggctaggaagaaactgcatcaactaacaagcaaaataaccacctaacatcataatgacaggatcaaattcacagataacaatattaactttacatgtaaatggaataaatgctccaattaaaagacacagactggcaaattggataaagagtcaggacccatcagtgtgctgtattcaggaaacccatctcacgtgcagagacacacataggctcacaataagggacggaggaagatctaccaaggaaatggaaaacaaaaaaaggtacgggttgcaatcctagtctctgataaaacagactttacaccaacaaagatcaaaagagacaaagaaggccattacataatggtaaagggatcaattcaacaagaataactatcctaaatatatatgcacccaatacaggagcacccagattcataatggaagccgttagagacctgcaagagacttagactcccacacaataataatgggagactttaacaccccactgtccacattagacagatcaatgagacagaaagttaacaaggatatccaggaattgaactcagctctgcaccaagcagacctaacagccatctgcagaactcttcaccccaaatcaacagaatatacattcttttcagcaccacaccacacctagtccataattgaccacatagttggaagtaaagcactcctcagcaaatgtaaaagaacagaaattataacaaactgtctctcagaccacagtgcaatcaaactagaactcaggattaagacactcactcaaaatcactcaactacatggaaactgaacaacctgctcctgaatgactgccaggtacataacgaaatgaaggcagaaataaagatgttctttgaaaccaacgagaacaaagacacaacgtaccagaatctctgggacacattcaaagcagtgtatagagggaaatttatggcactaaatacccacaagagaaagcaggaaagatctaaaattgacaccctaacatcacaattaaaagaactagagaagcaagatgaaacacattcaaaagctagcggaaggcaaaatataactaagatcagagcagaaatgaaggaaatagagacacaaaaaacccttcaaaaaatcaatgaatacaggagctggttttttgaaaggatcaacaaaattgatagaccactagcaagactaataaagaagaaaagagagaagaatcaaatagacgcaataaaaaatgataaaggggatatcaccaccgatcccacagaaatacaaactaccatcagagaatactacaaatacctctacacaaataaactagaaaatctagaagaaatggataaattcctcgacacatacaccctcccaagactaaaccaggaagaactcccattcataattgcttcaaagagaataaaatacctaggaatccaacttacaagggacatgaaggacctcttcaaggagaactacaaaccactgctcaaggaaataaaagaggatacaaacaaatggaagaacattccatgctcatgggtaggaagaatcaatatcgtgaaaatggccatactccccaaggtaatttatagattcaatgccatccccatcaagctaccaatgactttcttcacagaactggagaaaactactttaaagttcatatggaaccaaaaatgaacctgcactgccaattcaatcctaagccaaaagaacaaagctggaggcatcaagctacctgacttcaaactatactacaaggctacagtaaccaaaacagcatggtactggtagcaaaacagagatatagaccaatggaacagaacagagccctcagaagtaacacggcatatctaaaccatctgatctttgacaaacctgagaaaaacaagcaatggggaaaggattccctatttaataaatggtgttgggaaaactggctagccatatgtagaaagctgaaactggatcccttccttacaccttatacaaaaattaattcaagatggattaaagacttaaacgttagacctaaaaccataaaaaccctagaagaaaacctaggcaataccattgaggacataggcatgggcaaggacttcatgtctaaaacacaaaaagtaatggcaacaaaagccagaattgacaaatgggatctaattaaactaaagagcttctgcacagcaaaagaaactaccatcagagtgaacaggcaacctacaaaatgggagaaaatttttgccatctactcatctgacaaagggctaatatccagaatctacaatgaactctaacaaatctacaaacaaaaagcaaacaaccccatcaaagagtgggcgaaggatatgaatagacagttctcaaaagaagacatttatgcagccaagagacacatgaaaaaatgctcatcatcactggccatcagagaaatgcaaatcaaaaccacaatgagataccatctcacaccggttagaatggtgatcattaaaaagtcaggaaagaacaggtgctggagaggatgtggagaaataggaacacttttacagtgttggtgggactgtaaactagttcaaccattgtggaagtcagtgtggtgattcctcaaggatctagaactaggaataccatttgacccagccatcccattactgggtatatacccaaaggactataaatcatgatggtgtaaagacacatgcacacgtatgtttattgcggcactattcacaatagcaaagacttggaaccaacccaaatgtccaacaatgatagactggattaagaaaatgtggcacatatacaccatggaatactatgcagccataaaatatgatgagttcatgtcctttgtagggacatggatgaagttggaaaccatcattctcagcaaactgtcacaaggacagaaaaccaaacaccgcatgttctcactcataggtgggaattgaacaatgagaacacatggacacaggaaggggaacatcacactccggggtctgttgtggagtgagggaaggcaggagggatagcattaggaaatatacctaatgctaaatgacgagttaatgggtgcagcacaccagcatggcacatgtatacatatgtaactaacctgcacgttgtgcacatgtaccctaaaacttaaagtatattttaaaaaataccgaaatttttgtaggtatgtagttattattcaatttttttgaaatgaattagcgactggaatgcattcacttttctttgaagtttcaggtggtactttatgaaaaggaatttccaagatcattttaatagttatgtgatcaacttttcacttaatattcttccttgcactgatctgatacagatttttcacaacctcagtgaacaagtggtaaaatggtcaacagtggttctaatatatttagctttggaggttctacattaaaggttatttttagaaagttttcataattaacacagtcttgaggaactattttattatgaataatattttgttaatgtcagaggaaaagttgaacaatgatacgtatatctaaatagagaaaatttactcgtgagaataccacagtgagatcttcaaattttttgatggccaatttgtggagtctaaccaacagcaagttagggagaacacaatccacactgccctcagttctgacaccagttgtaaattcagggagttaccaaaaccacccttaagttcataattaattaaacatgctcatggaagctgacagaaagctgttatactcatagttacagtgtattacaactatagaatagagattaaagccagccaagggaagaaacacaaagggttgagtccaggagaagcaccaaatatggagcttcctttgtcctctccccatgagtaatggatgttacttttctggcatcagtgtttgataatacacgtggagtactgccagctagggaagctcacccaatccttgttgcccagattttttgttgaggctctgtcacatattacctatgtggctgacctttattctccggcctctctgtaggtaaaacttgtatggcatggtccaaagtcttagtcataaataacattgttagactattcagtgtccaaggcccccatgccttggacccccctcatcaggcatgatgttccatgggctagaagtcacctattactagccagtggcaaaggccaaacttctctttgagtaaggttaatttttcactacactctatgtcattcagatagtaaaagcagatgaaaccaaactggaaccaatggcttaacaaaactgagacttcagagactatgacagatgaaatggctccatattgtccacaggattaagttaaagtgtttgcattgaaaatcacctttctgtatcctggttctctctcaacttgttcttttatgaattcccttctgcagtcaattagagtcacatctactgggcatgccaagtgctttcctgctttggagggtttgtttataccacactcgctgttaatatattcactcatgatctgtaggttttgttgagcccagcccaggccccatctcctgtggaaggccactttcaccactttaccacttttgcagacattctccactgatttcccatagctaacattgcccatatagttttttttggctgttagcatatatttctttccattgatatgtatacctatatcttgtctttacaagttgatcttaagccttttgcaatttaaggaaataatggactatgccctgtgtttttttgagcccccagatcctattacaatgtcttgcacataacaaatgttaaataaatatttgaatgggaagttttcatatagacttgcaagtaggagtatattattcaaatatatgaattaaatcatcttgtaaaaatgatgtaaattatacttataaatttctgaggtaagttaatccagaaaaatattggaatcatttttggcaattcattgaagacactggaaacataaaggtcagaaaaatgatggaaaatggtaagagaagtattgccattccacttccacttcagggcctttcacattgctttcccctctgactgtaacactctttctctaaatatttctctaaataatctcactcagagaggcaaaaccaccctacctaataggtcagccctttcctcactatctctttatcttgccttttttttttttttttggatggagtcttactctgtcacccaggctggagtgcagtggcgcagtcttggttcactgcaacctccgcccccctgagttcaagcgattctcctgcctcagcctcccaagtagttgggattacaggcacctgacaccacacctggctaatttttgtatttttttagtagagacggggtttcaccatcttggccaggctggtcttcaactcctgatctcatgatccacccacctctgcctcccaaagtgctgggattacaggcatgagcaactgtgcctggcctatcttgctttatttttatattactttttactaaccaatcaacattatatgcttaatgtctttcttccctactaccagattataggctccgtagagtcagagacttattcttgctaacagttatatcttctacatctagaatagtgcctgattcttagtaagtgctaagaaaagtttttgttgaatacatgaatgagtttgtactattcagcaaacagaaagcttaatttttatatacgttcactttttgtggggtagtgtgtgtgtgtttgtttgttttcagagtgggccttactctgttgcccaggctggagtgcagtggcatgatctcagatcactggagcctcgcctcctgggctcaagtgatcctcccatctcagcctaccaaggtgctgggattacaggtgtgagccaatgcatctggccttacagtcactttttgtattattcaatttatgaaaacataattgagcttgaagaatttcaaagagaagcatctaaagtgattgaggaagtggtagaatgttttctaaaattactaaaaattattcagcttataaaaataattattaactttggccatatatggatgcacacatggtcaaagttataaaattataaactgtaataattaggttaaaataggcatgtttctcaaaccctagttttatcgaagcactctttaaaagtttttcagagaagtaaaggaatattatttttatacagtggataataaacatggagctctttcttaaaatttgtatgtatttcaaaagagttcaaagagctgttttgataaaaatcacaattttaaagataatgcaaaatgagaaatatttataacttcggaaagtaacagcatggatttcagctatggtgctttatcctaaaaggagttgcaggtttcattattgcctgttgatattaattccaaaaatgtcaagttccccagttgggacaatgaacagtcagcaaccctgagaacgaaggcatatccaaatgtgaccacaggagtattgggtaggtgtaactggagtctaaccccacatgtttgtggtagacagtcatctggaactctgacctagattacttagaatctgtgggaaatccaggctatgcccataggcctcagtgcctcctagtcttatagtctttaaagaatgctttgttctattcaagtattttccactggaatcccagcacttccttcaagaacaaggtacacatcatgaatattgactgctctcgaaatacgcttcgtcctctcctctctacacgcctccctttagttctcattgtagcttctttccctgaagagatttatttctacctgaagctagaatatggcttatatttttgaccattgtgtctggctttgattctgaagtgtttggcagcatttgtgtgcagtgactgggaagcagtttgttcacaatatgattttattgaggttttttcctttgcttctgtatttccacacttaagactccccccaccccatattcaaggaacaaaggctggcaatgatccagcccttttgtattattgtctctagttcatgattttagtagcatgtttgcaactagagtacacttttatattttctcttttcatctctgcctctatggatttttggcaaacatcaaggtgaataaatcagaccgaccactgcaaacccatctgctttcaggaacatgttagcagaccaatttgtgatgttttatcatccaacatagaactaaaggaggctccctgtggagtaagaatagaaggcaaagtctgaggtcaaagagtttttcagctttgaattatttatctgcctactgattgtgctagggacagtctatactggcatttttaatggcactaacagattggtacggtataatacttataaagttgaaatgattttgtggtagatttaaagtgaaaatacagcttatactttggatttgataatagggattaataaaaaaagatgctgtcacagtttttaaaatgtggcaaatcaaggtacacagtgttcatttgacaggatattacttttacacttcagccgctgctaaggttacatttgaaaacagtcttcctcactaaaatacctttctagttgttgacagcccagaaattggtcataaaaaataataggctgtggtcatacaaagctgtcttcctaatgcttgttgacacttcaatgctgcattcatttctttctcacaatgagcaagtaagtgatgattctctttgaaaaagaattaagagaattgcaaacatgtcagtgtatatacgttatactgggagaacagttcatgtaatactcttgataacaggcactaaattgaacctactttaaattgatcaaaagttaagcaagctgcttatatctcatagagttgattttaagctgatcttcaacaagctaaattgtattctctgctggactatgattttatccagtagagatcaatgtctttttttgagaataagtttagtcttactacctaatggtttggaaattaaagagaacccttgaaaggcagatttagtttctctgtgatgataatgtcaagggcatggggtatgggagatgtaactcagtttttcagactttatgacaaacttctttctactttgtgatctgagtcagcttttgtttatagaccaacctgacagaggcaggagaaaggatactctcaagaactttgcctatgagttacattcttggtggtgatggtccagaaaggaggcatatacttgtgatagtggtttttgtcctttccatacatgacttcaactattttttatctttaaaagctaaattctaaagtaatgatggaaatggtgactgctctggcaaatttagattctactgtaccctgtccttcctatccttcttctggacatatttgtgtacatctttctttattgtgtgggttacatgcaaagctggggccagagtgtgtattagttgataaaagcagtactttatctgaatagttgttcactgttgcttttatgaatggattcatagaaaaaagggtaatttaggacacataaaatacatgattggaaattaaacagagtgtgtgtgcattaatccatcattgtgttgtaaatctctaaaggaattggtttcataatcataatgtaacagaaaacagttgtttatttaggtatacagatacagaaggatgtctaaaatgtatattcaccgaaaattttaaacagttgaataatggttcttatggaaatgggaaaaatatttcttgtcattaattaataattttatttatttaacaagtactcagtttatactaggcaatatgctaagtacttcacatacattctaaataatgttattttaagtaacattatgcatttgatattatcatcccattttacacatgaggaaactgtagtttagcaagattaaataacttgtctgagatcctataggaattaagtgaggaaagtggaaatagaatcaatgagtttatctggcttcaaggccattataatatcgtattggactctgaggtacaaaatgggagatacacctgctgagaagtaagttgtggagcaatttatgcgtctagatattagtgaagtggctgccctaaaggaatgacttgttccctcttctcattctggagaaaactggcaggacttagggagcccgtgcatatatgggaatcttctcagaaaatgaattcatatcagttttggttgtgctataaaatgttttcagccatataaaaataaaatatcataagaaagcccttagctccagatatttagatgatgaattattgagcctctttttgtccttcctctttcttcattatatttcttgtaaaaattgaccactacaatcagaataagtctaaaaagaaaggaattaatattgaggagaaaaattgttttgttttccttttgcagaatgttaggttttgtaactttcttgactcaaatatttgttgaatgagtgagtgagtgaatttggatgattagatgtgcattcctgaaacataaactctttctactctcaactgttatgggtaattggaaggtgggttgacattagcttttgcttcaaaaacacaattattttcttttgattttcacaagttcagtacacaatttcattcctattaggctgtttacgagaatctgttctatctgttgacctttacttatatgagatggatcagtgactaatgtagcaaaataccttatttagtctataaagtgaagttctagaaattattcccttagccaaatgagagcactgtataagaagaaaactctaggaacacatatgtattaaacatttaaaagtaatcctaggaaggggaattttattttaattaattttttttttgagacggagtctcgctctgtcgcccagtggcacgatctcggctcactgcaacctccacttcccaggttcaagcgattctcctgcctcagcctcctgagtagctgggattacaggcatgtgctaccatgccgggctaattttttgtattttttagtagagactgggtttcaccgtgttgccaggctggtctcgaagtcctgagctcaggcaatccgcccgcctcagcctcccaaagtgctgggattacaggcgtgagccatcgcgcctggccaggaaattttattaagtaaggacaaggtgattttattttcatttgattttgtcctttatttcttaaatatggaaggtcaagtgtgcatagaaaaaaattactcagtattgaataggagcggtgagagagggcatccctgtcttgtgccagttttcaaagggaatgcttccagtttttgcccattcagtatgatattggctgtgggtttgtcatagatagctcttattattttgaaatacgtcccatcaatacctaatttattgagagtttttagcatgaagggttgttgaattttgtcaaaggctttttcggcatctattgagataatcgtggtttttgtctttggctctgtttatatgctggattacatttattgatttgcgtatattgaaccagccttgcatcccagggatgaagcccacttgatcatggtggataagctttttgatgtgctgctggattcggtttgccagtattttattgaggatttttgcatcaatgttcatcaaggatattggtctaaaattctcttttttggttgtgtctctgcctggctttggtatcagaatgatgctggcctcataaaatgagttagggaggattccctctttttctattgattggaatagtttcagaaggaatggtaccagttcctccttgtacctctggtagaattcagctgtgaatccatctggtcctggactctttttggttggtaaactattgattattgccacaatttcagctcctgttattggtctattcagagattcaacttcttcctggtttagtcttgggagagtgtatgtgtcgaggaatgtatccatttcttctagattttctagtttatttgtgtagaggtgtttgtagtattctctgatggtagtttgtatttctgtgggatcggtggtgatatcccctttatcattttttattgcatctatttgattcttctctctttttttctttattagtcttgctagtggtctatcaattttgttgatcctttcaaaaaaccagctcctggattcattgattttttgaagggttttttgtgtctctatttccttcagttgtgctctgattttagttatttcttgccttctgctagcttttgaatgtgtttgctcttgcttttctagttcttttaattgtgatgttagggtgtcaattttggatctttcctgctttctcttgtgggcatttagtgctataaatttccctctacacagtgctttgaatgtgtcccagagattctggtatgttgtgtctttgttctcgttggtttcaaagaacatctttatttctgccttcatttcgttatgtacccagtagtcattcaggagcaggttgttcagtttccatgtagttgagcggctttgagtgagattcttaatcctgagttctagtttgattgcactgtggtctgagagatagtttgttataatttctgttcttttacatttgctgaggagagctttacttccaactatgtggtcaattatggaataggtgtggtgtggtgctgaaaaaaatgtatattctgttgaattggggtggagagttctgtagatgtctattaggtctgcttggtgcagagctgagttcaattcctgggtatccttgttgactttctgtctcattgatctgtctaatgttgacagtggggtgttaaagtctcccattattaatgtgtgggagtctaagtctctttgtaggtcactcaggacttgctttatgaatctgggtgctcctgtattgggtgcatatatatttaggatagttagctcctcttgttgaattgatccctttaccattatgtaatggccttctttgtctcttttgatctttgttggtttaaagtctgttttatcagagactaggattgcaacccctgcctttttttgttttccatttgcttggtagatcttcctccatccttttattttgagcctatgtatgtctctgcacgtgagatgggtttcctgaatacagcacactgatgggtcctgactctttatccaatttgccagtctgtgtcttttaattggagaatttagtccatttacatttaaagttaatattgttatgtgtgaatttgatcctgtcattatgatgttagctggtgattttgctcgttagttgatgcagtttcttcctagtctcgatggtctttacattttggcatgattttgcagcggctggtaccggttgttcctttccatgtttagcgcttccttcaggagctcttttagggcaggcctggtggtgacaaaatctgtcagcatttgcttgtctgtaaagtattttatttctccttcacttatgaagcttagtttggctggatatgaaattctgggttgaaaattcttttctttaagaatgttgaatattggcccccactctcttctggcttgtagggtttctgccgagagatccgctgttagtctgatgggcttccctttgagggtaacccgacctttctctctggctgccttaacattttttccttcatttcaactttggtgaatctgagaattatgtgtcttggagttgctcttctcgaggagtatctttgtggcattctctgtatttcctgaatctgaatgttggcctgccttgctagattggggaagttctcctggataatatcctgcagagtgttttccaacttggttccattctctgcatcactttgaggtacaccaatcagacgtagatttggtcttttcacatagtcgcatatttcttggaggctttgctcatttctttttattcttttttctctaaacttcccttctcgcttcatttcattcatttcatcttccatcactgataccctttcttccagttgatcgcatcggctcctgaggcttctgcattcttcacgtagttctcgagccttggttttcagctccatcagctcctttaagcacttctctgtattggttattctagttatacattcttctaaatttttttcaaagttttcaacttctttgcctttggtttgaatgtcctcccgtagctcagagtaatttgatcgtctgaagccttcttctctcagctcgtcaaaatcattctccatccggctttgttccgttgctggtgaggaactgcgttcctttggaggaggagaggcgctctgcgttttagagtttccagtttttctgttctgttttttccccatctttggaagttctggccagggcagtcaggcaggagaaggaaataaagggtattcaattaggaaaagaggaagtcaaattgtccctgtttgcagatgatatgattgtttatctagaaaaccccatcgtctcagcccaaaatctccttaagctgataagcaacttcagcaaagtctcaggatacaaaatcaatgtacaaaaatcacaagcattcttatacaccaacaacagacaaacagagagccaaatcatgagtgaactcccattcacaattgcttcaaagagaataaaatacctaggaatccaacttacaagggatgtgaaggacctcttcaaggagaactacaaaccactgctcaaggaaataaaagaggatacaaacaaatggaagaacattccatgctcatgagtaggaagaatcaatatcgtgaaaatggccatactgcccaaggtaatttatagattcagtgccatccccatcaagctaccaatgactttcttcacagaattggaaaaaactactttaaagttcatatggaaccaaaaaagagcctgcatcaccaagtcaatcctaagccaaaagaacaaagctggaggcagcacactacctgacttcaaactatactacaaggctacagtaaccaaaacagcatggtagtggtaccaaaacagagatatagatcaatggaacagaacagagccctcagaaataacgctgcatacctacaactatctgatctttgacaaacctgagaaaaacaagcagtggggaaaggattccctatttaataaatggtgctgggaaaactggctagccatatgtagaaagctgaaactggatcccttccttacaccttatacaaaaatcaattcaagatggattaaagatttaaacgttagacctaaaaccataaaaaccctagaagaaaacctaggcattaccattcaggacataggcgtgggcaaggacttcatgtccaaaacaccaaaagcaatggcaacaaaagacaaaattgacaaatgggatctaattaaactaaagagcttctgcacagcaaaagaaactaccatcagagtgaacaggcaacctacagaatgggagaaaattttcgcaacctactcatctgacaaagggctaatatccagaatctacaatgaactcaaacaaatttacaagaaaaaaacaaacaacccatcaaaaagtgggcgaaggacatgaacagacacttctcaaaagaagacatttatgcagccaaaaaacacatgaaaaaatgctcatcatcactggccatcagagaaatgcaaatcaaaaccactatgagatatcatctcacaccagttagaatggcaatcattaaaaagtcaggaaacaacaggtgctggagaggatgtggagaaataggaacacttttacactgttggtgggactgtaaactagttcaaccattgtggaagtcagtgtggcgattcctcagggatctagaactagaaataccatttgacccagccatcccttactgggtatatacccaaatgactataaatcatgctgctataaagacacatgcacacgtatgtttattgcggcattattcacaatagcaaagacttggaaccaacccaaatgtccaacaatgatagactggattaagaaaatgtggcacatatacaccatggaatactatgcagccataaaaaatgatgagttcatgtcctttgtagggacatggatgaaattggaaaccatcattctcagtaaactattgcaagaacaaaaaagcaaacaccgcatattctccctcataggtgggaattgaacaatgagatcacatggacacaggaaggggaatatcacactctggggactgtggtggggtggggggaggggggagggatagcattgggagatatacctaatgctagatgacgagttagtgggtgcagcgcaccagcatggcacatgtatacatatgtatctaacctgcacaatgtgcacatgtaccctaaaacttaaagtataataaaaaataaaataataataaaataaaaaaataaaaaaagaaaaaaaagaaaaaaattactcagtgttaggcaaatttactctctagatttttttctttttaccaatttttcttttcctgaatcagactattggaaccatttaaacacagcataatgctaaatgcataatcagttcctagggaatacagtccaacgatttctctctcttaatgtcctgaaaagtacaaaaagagttatcctgcgggccaataggcacatatttacccctgaaatatttcagcaatggcagtagtaacatttttattcctcatctttcaggtagtttataagtggaaactattaacttatcggaagagagctcttctgttggagaaaacctggcagtgaaaactttggtttgcctggttaccagatttttgtactcaagactccagacaagataaaagaaatgtttcataatatatcactttatataatacctttatacttaccttattctatacccccaccccaccctgcagttttctttatcattagaaactacatttaccttggcaaatataaattttctctgtatccttttactgaagttatggtgattttttaaggctctattttaattcaggtttagcatttcattcctgtaagccatcagaatttcctctggatcgatttgtaatatgttcaatgtttgctaggaaatttggaagtttttggtttgcttcctctctttctgtatataagatctaattaccacccagcatgaaatagcaactgaaatgaaggcagcaagaaagggtagtggcttaccttagagctaatcaaccacccccttcttgtatacttcgcagctatcaagagaaagaaaaatggcattcattaaaataacatatattaaactttttttctttcttgatttgagactgaagagaaagtttcttcaaatctttatggaaataagacattaagcaattcttttaatttgcaattagtagtctgatgtgaattgtacaaaatattttcaccatcagtgttgctataagtagccccatactattttcttgacatttaaaaagataaacatttctaggaataaaataaaatcaagagaatgtttaatcatttttataaggctagaatttcactcaatttggggttttggtttctaaatttgtcttcaacaaatatctaggcttatctttaaagaagatatcatccttcacacctgtaatcccagcactttgggaggtcgaagtgggtgaatcacgaggtcaggagtttgagaccagcctgttccaacacagtgaaaccccatctctactaaaaatacacacacacaaaaaaaatagctgggcgtggtggcgggcacctgtaatcccagctacttgggaggctgaggcaggagaatcgcttgaacccgggaggcggaggttgcggtgagccaagatcgtgccattgtactccagcccgggcaacagtgtgagactctacttcaaaaaaaaaaaaaaaagagatcatcttaatatagtagcctgtagcttcctgttttgtggaatcagtttgttgggtaattaacctgggaaagattgacagtatttttactttttaaatgaccatggtctgagtttttatcagattgtcagatttaaaaattagataatttgtggtattagacagatgagaaatacatactctactattgtttggagtatgtattggaatgacagttctggagagagagagtacattcatcaaaattggaaatgcatgtaacttttgccttagcaattaaacctcaaggaatttatccttgaacacgtgcataagccatgtataaaatattccttatgatattgtttgttatataaatagaaaaaaatgcaaagaagatggtcattaataggagaatgttcagtaaattatgatatatctatatccagatataccttatttttaaaaagtaaccactcctacagagaataaactatatgtacatgtcttgataaggaacactctatgttatcccattaagtgaaagaaacagtctagtttgcttcaatggagatgtatgtatacaacttccctccatccctgccccttctccccatataaacatacatacacacacaaatatgtatagatagatgggtgaaaagatacaaaggagctgttggtagcacttatcttgggtataggactatgggtctgggatagaagggaagtttttatgtttttctgttgtttacttttcttgctgtttgagttttttaccatgtgtatatattatatttcataactgggaaaaaatttaataaccaggtctattttctttcttttttaggactcagcccaggagagtgttattactcgagatattcatcgtacatttcccgcacatgattactttaaagatactggaggagatggtcaagaatcgctctataagatctgcaaggtaggactctcttcctcactttttctaaattattttacagagctatattttagaaacccatttaaggatttttttactctgtcttcatttcttatttgcactatgccatgttttctgctttgcacacacgctatgagatcctcagtactgatcccagaaggtgacttttcggttgcatgtttcgtgcctcctcatgagggaggaggcgcagcatagcctcagtttggctctcctgctaacaggaaaggaacaaaaggtcctctgaggctatgctataaaagctcaaaagagtcctagatgactctgtccttctgacaagatcatgcagcaattgtctccatttttctgacaacaggcaagtgtaagaatcagtgtgcttattgttgaatactggcaaattattggatgttgttgatatattctgagttacgtcacatcatatatttttgtacggtttttatatcccattttgaaatcttttttctccctcattataagtaggcctggaaaaaacctgtttcctgattttcagtaaatgtgctctgcttggatacagaagattctgtctctgtcagtatagaatagccatcaagttattaattttatcagaaatgcagaatgaagtgtggtgggtatactcacattgttgatatctaacattctaaagagatggttaatgaataatgaactgcacaaaaatttggtaataatatggagaaaaaggcaaacatcatggctaatttgtaagttaggtaatcagttcctgaataatccaatttagcctttgtaatgagtagcaaatattagccagtgtggaattaagaagtatattcacaaatctgtttcattttatatttactgttttttaaaaacagcacttataaaagcactcacttctccagcatttaagaggatgtggagaaataggaacacttttacactgttggtgggactgtaaactagttcaaccattgtggaagtcagtgtggcgattcctcagggatctagaactagaaataccatttgacccagccatcccattacttggtatatacccaaatgactataaatcatgctgctgtaaagacacatgcacacgtatgtttattgcggcattattcacaatagcaaagacttggaaccaacccaaatgtccaacaatgatagactggattaagaaaatgtggcacatatacaccatggaatactatgcagccataaaaaatgatgagttcatgtcctttgtagggacatggatgaaattggaaaccatcattctcagtaaactatcgcaagaacaaaaaagcaaacaccgcatattctccctcataggtgggaattgaacaatgagatcacatggacacaggaaggggaatatcacactctggggactgtggtggggttgggggaggggggagggatagcattgggagatatacctaatgctagatgacgagttagtgggtgcagcgcaccagcatggcacatgtatacatatgtatctaacctgcacaatgtgcacatgtaccctaaaacttaaagtgtaataaaaaaaaaaaaaagcactcacctacatattctaaccaagtaggattaatgtttaattctgcaaatggcacgactttcattaaagtccttgcatgttggtggttttggcctcttcacactcctgtctctttttttcttactttttctctctctcatatttttttatctaaccattttggaggattataaatatatgctgattagaaatctatttttatatgaatgtgtcattcagagctagaaatatataacttataatctgagagtatactgatctttagaaagtgatatatcatctactttgaaaagtaccaaagaccattggatgccacaaaaaaaggtatatgttcattatatgcttgtgaaagacaaaagtaattatttaaaacatttttctactactttgaaattctgcaagctgattaacactggcttttgtaaagaggttaggaaaatttatatcatttccaagtttatttaagagggtctggtttatggcatatgcaacatttttttcccctagcatatagtatattttcagccagtcagtgactttcccttcagcttttctctgattgatactagatactttcttcacataactaaaacagatggttctaatgtgcttgcagcttctgacttaacattttgctccattgtagtaaaaatagtatttgccttgttatgtaatatttagaggggaaataatctgaaacattaccaaacacaaaaataaaagttgaacgattggcacttttaaatagttgatacactttgatttggtgttgcaaataataatgcaaccttgaattcatttgaaaatactcatcagtacattcccagagctcatgtggccattttagattatcagtatacattttacaacatgactaaaccattttaaaactctttctgaatgaagaatattgtaaaatgtatatctgagatactttattatcgaaaagtagcttaaatcacactaaattttgtgaagatgtagaaaacaaaattacattagacatagtattaaataaaagcaataaaagtttttaaggattttaatgctgtactgagctgtatatacataaaaataatttcacaacagtctttggtaatggatatgagcagagatgtatacatcctaccctgtagaccgcttggtttgtgattgacccggttccttcccatcttgatttactgttatttagtatctcatgccaggaaaccttaagtttgatgatagctcacaaataggatagcatatctatgagtaatttagtatagcatacttatgagtaatttagaatggaatattattctcaagcttccacatccacttttctttgctttttgtatccaatttgaaccacagtcttttattttatgacccccatcccatattcccaaaagctgcctgtgtgtaacctttaaggcttaaaggtagtctaaccatttaaaggtagtctaaggcttaaaggtagtctaactgtgtagtctaactgttctaacattgtttctagaaacattggttctagaataataactagcattatacctcacactcagccgtccacctctgagtttctattctggacaccccgcgcagaactgaataaacattaataacaccttgatcttatctcagctgctttgctatatgtaaataaggacagttttgcttttcctttaccaatccttattctttttctatttgtctcttgtcttattgcactgaccacacctttagtatagcgttcaaataaagctatcatagcaaacatccttttcttgctcctgatttgaaaggaaatgcatctaatgattaaccactaagaaagctgcatcttcttcacatcagcaacacaattgtaggcctttttttttaaaatagtgttttctatattaaatataatataatatattatatttaattatattaattaaatataattttagattatattaattaaatataattaattaaaataattttacatttgcagagtactttgacatatattacctcatttatttttgacaattcctcatcaatggagcctacactggagatataatatgctgtgctcttaaattgagcagaaattaagagaatttcagtgacaataagtttagaaatcaactctgttttcaaggatacaacaatctgactttgtagttgaaaagttttctgtggctctggtgaaaggagaaatgatttgaactgtcacattagagggaagactgttaaaaactcattgtcatgttttaatggccctgtcaattccagttttgcctcttaatatctttcttcagagtaggaggaaatcgaaatgattcaaagcttcttctgttgtcattaatttgtatgggggaagttgagctgaaagtattagtagaattcataggtttctgcagatgaagaggtttgcaaattaatagatttctgcaaatgaaagtttctgaaaatttggttcttccctctttctctccctgtctttcctattggttaggtcaataacatattttaaaagaatgtccatgagacagggaagaatatactaccaccccaaatatattttgcatttttattatttaacatgagatgtaaaaatctgctataagttgggagacaggttggtatagtttaaagcactgggcatcaggaaatctggttctggttttgattctttcactaagtagatctaagaatgagggaaatttgtaagggtgtggtgtcataagattgttccggttccaatgttctgtgattctcagtgttgttcaaattttttttcctgacatataacacataaatgcagaatttagcagttaaatcctgcgtcagttattagctctggctctcaatactaaagatgtaaaagggtcttctccttaaatctgaagattttacctggccttctgttacagtgttcggtttgttacatcaaatggagtgcattagtagtttagttttagatatacatctctttataagacctaagaccagttagtcatagtaatcaggtaaaatattattcagaacaatatgatttaaagtgatatttgatgtacaatttaatttgtgcatattgctttttctcattttttgtttggtgtaaatgctctctgaaaaaagaggatactgctattaacttaatgggagagattgaatatattatacagagattaatacctttgtttatctggattaataatttgatagcataatggtttataggaggacaaaaataaacttaacccttattttaccaaatatttttatcaaaaagattggatttattataaaaactagagcagttaaagtattgttttgatactaatgatgagttatctgctgcataattttggagaatgcaaataatcactgactcttaaaatgacatgtaatcatacattatttatattgctttctagacatagggggtatttgtgattatgaggatgaattatttttcacttagttgatattattttcaatacaattttctagccatttgactacttttaattcaactctttcttgatgtgtctgaatgagccctagttgaaatgtcagcatttactgaacaaattatagtcctctctcctctcctctccccaccctctcccctcctctcctctcctctcctttctctgtctctctctcttttctttttctctctctctctctcctctccccctctccccctctccccttcttcccctctctccctctccccctctcctctcctcttctctcctcttctcttcggggtcttgttctgttgcccaggctggggtgcagtggtgcaatcttggttcattgcaacttcagcatcccaggctcaagcaatcctcccacctcacccttccaagtagctgggattacaggcacgcaccaccactctgggctaattttggtctttttagtagagacagggtttcactatgtcaatcaggctgctcttgaatccctgaattcggacaattcgcctgcctcggtctctcagagtgttgggattacaggcgtgagccactgtgcccagctgctcagccccatattctttacatagcactgactaagcgctcctcctacttctgtggaactccttccactcatatctttggaatcggatggattccagagtaggagccatttgttgtgtgatgataggtgttcctggatcagatggatccaaaaggatttagtttggagcagtgcttttgaggaatcaggaagcacttggacaatcaagcagatttttctattctctgtgtatctcctatctctcccttgatttcctagtaagctgctttgaattatggcaaccttctaatgcagatccaaatatgggctgccaagaaatcctttgaacccctggggccacctgctttgccagcacattctaatgagcagtgaaataagtgattttaacagacacttagagacagcagcatattctccaagcaaattaacttccttacggaacagtgaattctttcaggtcttataagaaagacttggagaaccatcctactgtggatcaacataatcataacagtaatagtaaaaatttgtaaagccctgtggttttgaaagcattttttgcatgtcgttatttgatccccacagttactccattagaataaagaaggtaccaaatttgcatactgataaatattaatctcttagagtcagagtttgatttagtttttttcctttttaaatcttttcatattattcattttagatgaattgtccaattctgctttattgccaagaacaattatgtttatatctatttagaacactaaatatatgcacacacatataaataaatcttagcaacccaaagttgaaaaacttcacttatataggggtgtgtgtgtgtgtgtgtgtgtgtgtatgtatgtatgtatgtatgtatgtttggggttaatttcatacttaccctttactcacaagatttcaaaatcatttattgtatttgttagtatcattatagtcatacaaaagggttattttgggggtttttttggtcctctttaatatacgtattagtaggatagactttatgagtcacagctcaactgagaagatataatgtgattttaaaatatagatttttcttctgagactgtgaaaggtcagggtttgtgaagctagagtcctggaaagagaatgagtgatttataatactcttcagagtgcctaaagagatttttaaatttcttcatggtcttagtccctaagagctttccttgaaatagctttttagtttctgtgaagcctgtagtctttcaactgaaagcctgattgaagccatcacactcttactaggatacagaagagaaagggtgggattttgaggatgataaaaatggataaacttagaataaagggattggtgtgacgcctaagggtttgattatagtcactctttttaaaaaacactactctttcaggaggaaaaggaaagtaagattactatctaaaatacaaaagaaaaaaaaaactaacctgcaaagatgaaacacagggaaccttcaaataaaatgctctttatggtgcctcctgaattatgattttttttcatatttgagatctatttctatactatattcaaatggcttaaatatcctagacaaaaacttgtagttgttcttgaatggattattttatgttacagaattatgaggatttatctcctggttactaattgttatgcagttgacaatatttttataagtgaagcctcctcttcccgcacctttaaagcctcttctttaatcagaacccttcgtcctttctccctagaaataatgtgaatctgaattgccctactcctccttcccatctgtccaaatcttagttgtccatctcccttataaaggtagtcctacgcactatacccacagtgatttatagattaaaacaaatctggagatcaaatgtataacatgagcactatagttaataaaattgtattgttttagggatttttgttaaataagaagattttagatgctcttgttacacaaacaaaaaaaagtacgtgagatgatagatatgttactctgcttcactgtagtaaccattttactataaatatatatcacataacgttgtgttgtaaaccacaaatatacacaataaaatttatttttaaaatattttataaaatttagattatgtattatatatatcttttcaattatactttaagttctgggatatgtgtgcagagcatgcaggtttgtttcataggtatagatgtgccatggttgtttgtagcacccaatcaacgtgtcatctacattaggtatttctcctaatgctatccctcccctagccccccaccccccaacaggccccagtgtgtgatgttcccctccctgtgcccatatgttctcattgtgcaactcccacttatgaatgagaacatgtggtgtttggtttgcagagaatgatggtttccagcttcatccatgtccctgcaaaggacatgaactcattcttttttatggctgcatagtattccatggtgtatatgtgccacattttctttatccagtctatcattgatgggcatttgggttggtccaagtttttgctattgtgaatagtgctgcaataaacatatgtatgcatgtgtctttatagtagaatgatttataatcctttgggtacatatccagtaatggggtggctgggtcaaatggtatttctagttctagatccttgaggaatcttccacaatggttgaactaatttacactctcaccaacagtgtaaaagtgttcctgtttctccacatcctctccagcatctgttgtttcctgactttttaatgatcgccattctaactggtgtgagatggtatctcattgtggttttgatatgcatttctctagtgaccaattataatgagctttttttcatatgtttgttggccacatacatatcttcctttaagaagtgtctgttcatatcctttgcccactttttgatggggttgtttgtttttttcttgtaaatttgtttaattaagttcattgtagattctggatattagcccttggtcagatggatagattgcaaaaattttctcccattctgtaggttacctgttcactgatgataagtttcttttgctgtgcagaagctctttcatttaattagatcccattcatcaattttagcttttgttgctattgcttttggtgttttagttatgaagtatttgcccatgcctatgtcctgaatggtattgcctaggttttcttctaggatttttatggttttaggtcttatgtttaagtctttaatccatcttgagttaatttttgtataagatttaagtaaggggtctagtttcagttttctgcatatggctagccagttttcccaacaccatttattaaataggaatactttccccattgctagtttttgtcaggtttgtcaaatatcagatgtttgtagatgtgtggtgttatttctgaggcctctgttctgttccattggtctatatatctgttttgataccagtaccatgctgttttcgttactgtagccttgtattatagtttgaaatcaagtagcatgatgcctccagatttgttctatttgcttaggattgtcttggctatacaggctttcttggttccacatgagaaatttaaagtagttttttctaattctgtgaagagtgtcagtggtagcttgatggggatagcattgaatctaaagattgctttgggcagtatgaccatttttgcaatattaattctttctatccatgagcatggaatgtttttccatttgtttgtgtcctctcttatttccttgagcagtggtttgtagttctccttgaaaagggcctccacatcccttgtaaattgtattcctaggtattttattctctttgtagcaattgtgaatgggagtttactcatgatttggctgtttgtctattattggtgtataggaatgcttgtgatttttgcacattgattttgtatcctgagactttgctgaaggtgcttagcagcttaaggagactttgggctgagacagtggggttttctaaatatataatcatgtcatctgcaaacagagaaaatttgacttcctcttttcctatttgaataccctttatttctttctcttgcctgatttccctggccagaacttccaatattgtgttgaataggagtggtgagagagggcatccttgtcttgtgccggttttcaaagggagtgcttccagcttttgcccattcagtatgatattggctgtgggtctgtcataaatagctcttattattttgagatatgctccaccaatacctagtttattgagagtttttagcatgaaggagtgttgaattttatcgaagccctttccgcatctattgagataatcatgtggtttttgtcattggttctgtttatgtgttggattacattgattgatttgcatatgttgaacaagccttgcatcccagggaagaagccgagttgatcttggtggataagctttttcatttgctactgggttcagtttgccaatattttattgaggattttcgcattgatgttcatcgggggtattggcctgaaattttctttttttgttgtgtctctgccaggttttgggatcaggatggtgctggcctcataaaatgagttagggaggagtccctctttttctatttttgaaatagtttcagaaggaatggtactagctcctctttgtacctctggtagaattcaactgtgactccatctggtcctgggctttatttggttggtaggctattaattactgccttagtttcagaacttgttattggtctattcagggactcgacttcttcctggtttagtcttgggagggtgtatgtattcaggaattcatccatttcttctagattttctagtttatttgtgtaaaggtgtttatagtattctctgatagtttgtatttctgtggaatcagtggtgatatcccctttatcattttttattgtgtctatttgattcttctctcttttcttttttattaatctgggtaatgttctatctattttgtaaatcttttcaaaaaaccacctcctggattcattgagttttttttgaagggtttttcatgtctatctccttcagttctgctctgatattagttatttcttgtcttctgctagtttttgaatgtgtttgctcttgcttccctagttcttttaattgtgatgttagggtgtcaattattgatctttctcattttctgatgtgggggtttagtgctataaatttttctctaaacacgctttaactgtgtcccagagattctgatacattgtgtctttgttctcattggtttcaaagaacttatttatttccaccttaattttgttatttacccagtaaacattccacatgaagttattcagtttccatgtagttgtgcaattttgagtgagtttcttaatcctgagttctaatttgatgacagtgtcgtctgacagactgttatgatttccattcttttgcatttgctgaggagtgttttacttccaattttgtggtcaattttagaataagtgcgatgtggtgctcagaaaaatgtatattctgttgatttggggtggagaattctgtagatatctattaggtccgcttggtctagagctgagttcaagtcctgaatatccttgttaattttctgtcttgttgatctgtctgatattgacagtggggtgttaaagtctcccactattattgtatgggagtctaagtctctttgtaggtctctaagaacttgtgttatgaatctgggtgctcctatgttgggtgcatatatatttaggatagttagctcttcttgttgaattgatccctttaccattatgtaatgcccatctttgacttttttgatctttgttggtttaaagtctgttttatcagagactaggattgccacccctgcttttttttgctttccatttgcttggtaaatattcccccatctctttattttgagcctgtctgtgtctttgcacatgagatgggtcttctgaatatagtacactgataggtcttgactctttatccaatttgccagtctgtgtcttttaattcgggcatttagcctgtttacatttaaggttaatattgttacgtgtgaatttgatcctgtcgttatgatgctagctggttcttttgcccattagttaatgcagcattttcatagtgttgatggtctttacaatttggtatgtttttgcagtggctggtaccagtttttcctctccatatttagtgcttccttcaggagctcttttagggcaggtctggtggtgacaaaatccctcggcgatggcttgtctgtaaaggattttatttctcctttgcttataaatcttagtttggctggatatgaaattctggttgaaaattcttttctttaagaatgttgaatattggcccccactctcttctggcttgtagggtttcctcagagagatccgctgttagtctgatgtgcttccctttgtgggtaacccgacctttcactcatgatttggctctctgtttgtctgttattggtgtataagaatgcttgtgatttttgcacattgattttgtatcctgagactttgctgaaggtgcttattagcttaatgagattttgggctgagacaatgggtttttctagatatgcaatgatgtcatctgcaaacggacaatttgacttcctcttttcctaactgaataccctttatttccttctcctgcctgattgccctggccagaacttccaacactatgttgaataggagtggtgagagagggcatccctgtcttgtgccagttttcaaagggaatgcttccagtttttgcccattcagtatgatattggctgtgggtgtgtcatagatagctcttatcattttgagatacgtcccatcaatacctaatttattgagagtttttagcatgaagtgttgttgaattttgtcaaaggccttttctgcatctattgagataatcatgtggtttttatctttggttctgtttatatgctggattacatttattgatttacgtatattgaaccagccttgcatcccagggatggagcccacttgatcatggtggataagctttttgatgtgccacttgattcggtttgccagtattttattcaggatttttgcatcagtgttcaccaaggatattggtctaaaattctcttttttggttgtgtctctgcccggctttggtatcaggatgatgctggcctcataaaatgagttagggaggattccgtctttttctattgattggaatagtttcagaaggaacggtaccagttcctccttgtacctctggtagaattcagctgtgaatccatctggtcctggactctttttgattggtaagctattgattattgccacaatttcagagcctgttattggtctattcagagattcaacttcttcctggtttagtcttgggagggtgtacgtgtcgaggaatttatccatttcttctagattttctagtttatttgtgtagaggtatttgtagtattctctgatggtagtttgtatttctgtgggatcggtggtgatatcccctttatcattttttattgcgtctatttgattcttctctcttttcttctttattagtcttgctagcggtctatcaattttgttgatcctttcaaaaaaccagctcctggattcattaattttttgaagggttttttgtgtctctatttccttcagttgtgctctgattttagttatttcttgccttctgctagcttttgaatgtgtttgctcttgcttttctagttcttttaattgtgatgttagggtgtcaattttggatctttcctgctttctcttgtgggcatttagtgctataaatttccctctacacactgctttgaatgtgtcccggagattctggtatgttgtgtctttgttctcgttggtttcaaagaacatctttatttctgccttcatttcgttatgtacccagcagtcattcaggagcaggtttttcagtttccatgtagttgagtgattttgagtgagtttcttaatcctgagttctagtttgattgcactgtggtctgagagacagtttgttataatttctgttcttttacatttgctgaggagagctttacttccaactatgtggtcaattttggaataggtgtggtgtggtgctgaaaagaatgtatattctgttgatttggggtgaagagttctgttgatgtctattaggtctgcttggtgcagagctcagttcaattcccaggtatccttgttaactttctgtctcgttgatctgtctaatgttgacagtggggtgttaaagtctcccattattattgtgtgggagtctaagtctcttggtaggtcactcaggacttgctttatgaatctgggtgctcctgtattgggtgcatatatatttaggatagttagctcttcctgttgaattgatccctttaccattatgtaatggccttctttgtctcttttgatctttgttggtttaaagtctgttttatcagagactaggattgcaacccctgcctttttttgttttccatttgcttggtagatcttcctccatccttctgttttgagcctatgtgtgtctctgcaggtgagatgcgtttcttgaatacagcacactgataggtcttgactctttatccaatttgcaagtctgtgtcttttaattggagcatttattccatttacatttaaagttaatattgttatgtgtgaatttgatcctgtcattatgatgttaggtggttattttgctcgttagttgatgcagttttttcctagactcgatggtctttacaatttggcatggttttgcagtggctggtaccggttgttcctttccatgtttagcgcttccttcaggagctcttttaaggcaggcctggtggtgacaaaatctctcagcatttgtttgtctgtaaagtattttatttctccttcacgtatgaagcttagtttggctggatatgaaattctgggttaaaaattcttttctttaagaatgttgaatatcggcccccactctcttctagcttgtagactttctgccgagagatccactgttagtctgttgggcttccctttgtgggtatccctacctttctctctggctgcccttaacattttttccttcatttccactgtggtcattctgacaattatgtgtcttggagctccatccagttttgttcccttgctggcaaggagttgtgatcctttggaggagaagaggtgttctggtttttggaattttcagcctttttccgctggtttttcctcatcttcatggatttatctatctgtggtctttgatgttggtaacctttggatggcgtttttgcgtggatgtcctttttgttgatgttgatgctgttcctttctgtttgttagttttcctctaacaggcccctctgctacaggtctgctggagtttgctggaggtccattccagaccttgtttgcctgcgtatcaccagcataggcttcagaacagcaagattgcttcctgttccttcctctggaggctttgtcctagagaggcactcgccagatgccagccggagctctcctatatgagatgtctgtcgacccctgctgggaggtgtccccagtcaggaggcacaggggtctggaacccacttgaggtggcagtctgtcccttagcagaactcaagcacagtgatgagagatctgctgctctctttacagccggcaggcaggagtgtttaagtctgctgaaggtgtgcccacagcctccccttcccccaggtgctctgtcccagggagatgggagttttatctctaaggtcctgactggggctgctgcctttctttcagagaagccctgcctagagaggaggaatctagagaggctgtctggctacagtatcttttctgagctggggtgggctctgcccagttcgaacttcccagaggctttgtttacactgtgaggggaaaaccgcctactccagcctcagtaatggtggacgcccctcccccaaccaagctggagtaacccagggcaacttcagactgctatgctggcagtgagaatttcaagacagcagatcttagcttgctgggctccatgggggtgggatctgctgagctagaccacttggctccctggcttcagccccctttccaggggagtgtatggttctggcattccaggtgccactggggtattaaaaaaaactcctgcagctagcttggtgtctgctcaaatggccacccagttttgtgcttgaaacccagggccttggtggtgtaggcatccgagggaatgtcctggtctgtgggttgcaaagaccatgggaaaagtgtcatatctgggccagattgcattgttcctcatggcttcccttggctaggggagggagttccctgaccccttcacttcccttgtgaggtgacaccccaccctgcttcaggttgcccccgtacccactgtctaaccagtctcaatgagatgagctggtacctgtgttggaaacgcagaaatcacccgccttctgcgttgatctagctgggagctgcagactggagctgtttctatttgttcatcttgccagccctatgtatcatattttgaacaatatctgattactttcatttaaatgttttctgcattgtgttcagtgtttgagggaagaagctatctcatattttctttgtcctagagagccaagtgtagtactagtaacattgtgtcaatataattagctctgtgaatttgacttgatgaaaatgagtatgttagttcagatcctctgagaagcctgtcaccaagacaggattaagtgtgtaagaaatgtattatgggaaatggttgtaagagaaaatagggaaggagctgggagagtctcggagagccattggatcacaacccaagtctgactccaagggaagaagaaaggaaagttaggtgcaaatattgtagatgtagtttgtttctaaggaacatttgaaaagaccaatggtgagtcgtcagccaaagttactaattaggtcccatttcctcagaagctggcccaccttaatattcctgctgtgctcagtcacagctcctgggaacctcatgggaactatggccttggtacaaacgcaggaatgattttacagcatagcagtcagttgggccctcgttcaattacagcctcttctgttggagacctaatgtgtatttttatggccagaatacagatattttagatgaaaatttaatgcatataaaccctaaaagagcattctatttctatcacttacttcttctgtgaagtacttttattcataaaaacttttcaggctacattccttagggcaaggctatagcttttcttcattttgtatagttcatgagtggtgtcctgtattagaccctatttaaaaatcaaaagtccaagaatgtaaactaaacactctgagtaatttaccatattcagttagtagtttacttgtaatgaggacattacaatttttttaaaaaaaatatggtgttctagttgttttacatttctgtgtctttaaaaaaagtatgtgaattcacttttaaattgttgccaaagggctttttttctttgcaatgttacataaaaggaaacttacatataggaattttgccagctatgttagataagaaaattgctttgtgagtgtatatttgtgagtacatctagttttctacatttattgtctccagtgtttatttcacatcactgaatctatttttagagcttatgttgatactctcctttttccccagcatataggacaaatgtaataaccttttttaaactcattttttatgattagattcaacagagaaaatgatactgttaaatttatatatacatatatttccagatttctgtgtatttttaacaacctcaaactcataaaagctacaagttcagaattttgttttcctaaactgtttgagagtgatttgctaacataatgcctcatcacccctttaggatgtttttcttataaacaagggtattcttctacataatcataatgcaacatccaaatcagtactacctaatctatagacatcattcagtttttactaatcatccaaatgttcttgatagattagaaaaaggatccagttcagaatctcttatttcattaagttgtcatgtctgtaattcccttcaacctggaaccatttcttactctttcattcactttcttgaccttgatgctttcgaagattacaggccatttttttgaatatccctcaatttgggcatgtctaatgttttgtcatggttagattcaggttatacatctttggcaggaacaacacggaaagaataatctgttcttatttcttccactcaggtaatatgtatgcagtttcattttttcccattattggtgatgattagtgtgatcacattaataaggtgtgtctaccaggctactccacgatgaaattactcttttccccattgtaattaataggtattttgtgtagagatacttcataactatttaattgccccatttctcatcagactttcaatttattagtttatttatatgttatatcaatatggactcatgaattctcattttattcaatggattgtatttccttgctatcattatttgttttggtgttcaaattgtccccatattgtccagtgggaagacttcaagctggtttctgtgtccttttaatatattccatcatcctttgagccttgcctttctttatggttcagaaagatgttccaggcttatgtctctgtcccagctctagaattagatctttctccaaagagccttgtttcctttagtcaaaatattaagaaaccaagatctgcttggtaaatatgtttattgttatagagttgtcattgcttacaagtcatctcattgtatagaactaaggaatctatatgtatatacatatatgcatgtgtgtgtgcatacaaacatgtatttatgcccatttttttttattaatacataattcacataacattcacccctttaaagtgtacaattcaggctgggcatagtggcttacgcctgtaatcccagcactttgggaggccacggcgggtggatgacctgaggtcaggagttcgagaccagcctgttccaacatggtgaaactccgtctctactaaaaatacaaaaattatccaggcatagtggtgggtgcctgtaatcccagctatttggaaggctgaggcaggagaatcacttaaacctgggaggcagaggttgcagagagccgagatcatgccactgccctccagcctgggcaacagagtgagactccttctcaataaatagaatagaatagaataaatgtacaattcattgagttttagaatttacagagttgtgcaaccattactactgtttaatttcagaacatttccatcagtccaaaaagaaaccttatacccattagaaatcaatcaccctttattacccctgccctcagcccttggcaatcattaacctatattctgtttttatggatttgtctggtgatattattgtttgttgtggcagttgtttgattggttactgacttttgtgaactaattctgtagagtttgtattctttgtcatgtctgtccactgaaatctctgcttggtggtcagctaatgattgaatagacatgtccttaaatttctggaaccagtaagtctaccagtctttgccaaggagttctgtgtgtgtttgaacatgcgtttgtattactcaaccattcatttgaaaactctgtcttgctttcacctcctgcttgtatagaacttcaaagtcagccaaaggcaagagtgtagagccttctcaggactttcctaatgcacaaagccttgagcatgtacatagccctgcacatgagcattgctctctaagttctcagaaatatatctgagtctttcaaagcctttatggatgtctcattccccagcatttccttttaagctttttgattagtgtatttgccacaattttttattgtgtatagttagggttacatagtggtattttgatacatacaatgtaaaatactcagatcaaggtaattagcatttccatctgaaatatttatcatttctttgtgttgagaatattcaatatcttccttccagctatttgaaactattattgttagctatagtcatcctacagtgctatagaacactagaacttatttctcccatttagctgtaattttgtacactttaacaaatctttctctccacccccttctctctacccttccaagcttctagtatcctctattctacttctttcttctatgagatcaacttttttagcttctgcatatgaatgagaacatgcagtatttaactttctgttcctggcttattttatttaacataatgtcctcctttttcatgttgccataaatgacaggatttcattcttttttgtggcttaaagtattccatttggtatatataccacattttctttatccattcatctgttgttggacacttgggttgatttcttatcttggctattgtaaatgctgcagtgaataaaggagtgcagatatcccttcaacatcttgatttccttttctttggataaattcccagtagtgggattgctggatcatatggtagttctatttgtagtttttttaggaaactccatactgcttgtgtagtcgtttgccccaatttgtatctaccttctcagacagccacaaaattaaacagttgcctgtaactgcttttgacaaatgcccccaggaaaaaggcttttcatattgggtgagtcttgcaagtggagtgttccagggaaccaccattcaggtcaaataatgataattctctgggaataaggctttgcatttcactgtctctgatgtctgccagactgcttgtcattgcaaatgcaagctgttagttttcaaggttatcatggagctggagggtgggagatgggaccaaagcaagttaaaaacgccacaaagctccctgttcttaccaagattcagttatttttctggaataattaccctccaggcagctgcaggtatttggtcaatttctagagttctgaaaaagttgattctgattatttttgtgatatttcctgctattgtggaggagctaatttttggtgattcttgctctgcctttttgctgatgtcactgcccatatttttttctatatataaccatttgtgttgaaaactagggattcatagcagtatttccaattccaatccaacagcagaagattaatctagtgttctcccttcctatatttgtaactaacttctctgacagggagaaatgtagctcccattatccttaatatatttatctttttgagcagtatctctctatatatccaatctctcattactgctgccagttctcttgtgtgcaaataccctccttaccatagtaagctctaacaccctgtgccaggatgtcaccctaggtgaactcctccttatcttgtcatacattgattctccattcttggccacccacatccccacctgggtgggcttgtcattttttttagggtctgacactccacaccaggccacccctgtgtgaatgttctatcttgctctgcctaatggtttcaggaagggaacaggaagcttaattactttttaaagatgaattttattaccctttccgttcttcatgagttttacttatgagagtttgcaaagatatgttagacctaaatcagtatctctggcttcaagaatggaaggaaggtacacaaaactggtaaacaaattgatttttgttttaggcacctgtaaagaaaaactgattattttcaagaaggaagtgaatctaagaatccataagaattttagcaatgagtaagaccctatccaggcagctccatattcattcctgacgataaatcaaatgggttatttgaaagaaagacatagtaattttccttgacatcagccagtcattactgccatttagtcagcacatccctgtgtgctaggcattgtgtttaatccttaagtttgtatggtggtttctatttttacctgtgtgttaccgatgaagatacctgctttactttaccaaaaaaaaaaaaaaaaaatcctcaaaagattgatctatagttgctgttactgattcctctcttcttactttttattaaacccttttcatttaggatttcacctataccacttttctgaaaatggtgtggtcagaacacaaatgtattccatatcataactctaattattaaatctcagtcttcttcctccagacctgtcagcaccatcgtgcactgttgatcactcccttgttcttcaagcactttcttcacttggcttctactactttttttcttgcagtcacttttgctcatgctttctctttttctcaacttcttcatttcagtctttggacatctgttttctatctacatttattgcattggtagcctcattcagtctcatggctttaaataccatgcattcattgataatttccaaatttatatatctgaccccaaccaattccttgtacttcaaacttatatattcaattgcctatttgatttctcctctagagctctaacagatatctcaaatacagcctatgtaaaacagaatgtttgatctttctcacaaaagctgctcacccgtagtttttttttcccatctcagctaacagtaactccattctttcaattcttcagtctacaaacattgaatcatccttgctgctagtttcttcctcttacactacatgttgagtaggtaatacctgttgtctaccaccagaacagcaatcccaggatattaacccacaacacggtttgcaggtattagggttgccaagaaaaacatgactcacagaggcactggatggaacaacactgtactcacatacagaagagacagaacaacagtatcagtaataagtgtcagtggatcttgtctcacagccatggcagggaatgatctgtatacaccccttttgtgctgcaagtgaaggaccttgttcgctctccaccagggacagaaatagcagtggggtaagccaggcgccatatgacacacacttaagcagaacaaagaagtataaatcaaactcagaagagggaaagaaattcctaaacaaggtaataataagcccagcacagactgtgagggctcctgttcttcatgtaagaaactattccaggcccaaggcatattcttttgcaaccatggaatggtcaacaggttgcacacgattcccttgcccagcaccacacaaccagttttttaggaaatcttactgactccaccttcaaaacatagccagaatcttattatttcttgccacttcactgtaactaccctggtctaaactaacatatctcctacctggtcaccttgcttccagtgggtttctttttcatttagtattaaagcctacattcttacggtgatttaccaggctgtaaactccacatatgactattctctctatcatgcattctgtcccagccacactgccagccttgctcacacttcagagcccttgccctggctgttctctctgcctggaacacttatccaagaaatctacatggcttgttttttaacctctctgaatcccttgctcaagtgttactttcttaatatggcctgccttaaccactcttttaaattggaacctcttcttagctcagcattcctcagcccttttctctgctttgtcaccgttgcacttattgccttcaaagatactatatacattatttatttattatggccattgtctatcatcttccactagaaaataagctatatgagagcaattttttgtccattttattcattgcttaccctagtcttccacatgatagataataaatatgtgttgcctcagggaaagaaatgaaagtttagggaagttaagtgattctagtaaatggcagagctggaatttgagatgtttggcattcagaactactattagaaaacttttaagtaaattttttaacaaacagtgattttaaagtactatcaactagttactgttctgggctgtatattaaggggccaattttgtgatctaggctaatctaagaacctcataaccatattgattttataggaaaatacatgctgagtttgaaagaaaaactagtaaagaacttttagaaaatgatctgttcatcactgtggactacttgtactgaatactaaaggagtaagaaaacatgtagttgataatgattctaaacgcttgaggaaaaaagaacatgaggaatattgggtactgaaaaattttaataaaaatatttatttagagtcaattttttaaatgtaaaattgtagtctgggaatatacctacattaatattttactgacttaatttttccaatgcttgtgggccttcctaaaactaataattcattattataatcaatagcaatttcagttttattaattaaaaatattttgttatgatttttataggctaatgcagcaataaactcttttggtttagttttggatatggctgtgtgtgtgtgtctagtaagatataccattatgcatcctgtaacgacatttcagtcaacaatggactgcatttacaatggtggtcccataagattataatggagctgaaaaactcctatcacccagtgacatcatagcatcataacattatagcgcaacacattactcacctatttgtgttgatgctggtataaaacctactgtgctgccaggtgtataaaggtatatagcatatacaattatgtacagtaaataacacttgataaggatagtaaacaactatattactagtttatgtgtttactatactgtgctttttaattattattttaggatgtatttcttctacttataaaataaccataaaacagcctgaggtaggtcgttcaggaggtatccagaagaaggcttttcttttctttttttttttttttttttgagttggagtctggctctgtcgcccaggctgtagtgcaatgtcgcagtctctgctcactgcaacctccgcctcctgggttcatgcaattttcctgcctcaacctcccaagtagctgggattacagatgtgtaccaccacgcccaactaatttttgtatttgtagtagagacggggtttcaccatgttagtcaggctgatcttgaactcctgacctcaagtgatccatccgccttggcctcccaaaatgctgggattacaggcgtgagccaccgcgcctggcctggttgtttgtttgtttgtttgtttgtttttgaaacagagtcgcactctgtcgcccaggctggagtgcagtggcgcaatctcggctcactgcaaaactccacctcccaggctcaagtgattatcttgcctcagcctcccaccaccacacctggctaatttttgtatttttagtagagatggggtttcaccatgttggccaggctggtctcgaactcctgacctcaaatgatctgcctgccttggcctcccaaagtgctgggattacaggcattagccactgtgcccggccaagaaggcatttttaccactggagataacatctccatgcatatttttgtccctgaagaccttcagtgggacaagatgtgaaggtggaagatggtgatattgatgattccgaccctgtataggcctagcctaatgtgggtgtttgtgtcttcattttaaataaaacagcttaaaaagtaaaaacaaataaatgaaaaaattttaagtagaaaaatgttatagaacaaggatataaagaaagaaaatattaaaatatttctgtatagctgtacaatgtagttttaagcaaagtattattacaaaagttaacaggttttaaaaattaaaaataaagttacagtaagctaagattttgtcattgaagaaaaatattttaaaataaatttattgtagcctaagcgtacagtatttataaaggctgcattagtgtacagtaatgttccagaccttcacattcacccacctctcactcactgactcacccagagcaacttccagtcctgccagctgcattctcagtaagtgccctatacaggtgtgccatttttaatctttcataccacatttttactgtaccgtttctatgtttagacactcaaataattatcatactgttgtataaaactatagcacatacatggtttcttgtagcagcccagtaaagaattgcctactattcagtccataagactaaatagtatatactgtaacatgctgtacaagtttgtagctgagaagcaacgagctataccatatagcctacatgtgtaataagctgtatcacctgagtttatgtaagtactctctatgatgtttgcacaacaacaaaattgcctaatgacatgtttcttagaacgtattcctgtcgttaaggaaggggaatgcctgtgcatatatgtatatatactcacatacacacacgtggttgatcctcattatttacagattctgtatttgcaaattcacctacttgcttaaatttatttgtaaccacaaaatcaatattctcaatacttttatggttattcactgatatgtgaatatgcagtgtcaaaaaatttgagtcacctgatgcacacatttcaagttcaggtggaacaagttgatgctctgccttcttatttcatctctcatactgtaaacaagtattctcctgctatatacttattgtcatgtgttttgcatttttgtgcttcttgatgatttttctgtttgaaatgttccctaggtgcagtgctgaaatgctgtctagtgtttctagggactcagaggctgtgatgtgccttgcaaaaaaaatacacattacgtaagcttcattgaggcatgaattacagtaatgttggccatgagttcaatattaatgaaacaacaatatatattaaataaggtatctttaaacagaaatacacttaaaacaactttgtgtattgattagttgctgaaaatgttgtgaccaggggttctcaggagcctagccgtctattatcccctaggtgtagtaattcagtgtttgcttattcagtgttggggcacctttatagaacataagtattaagaatgatgacaattgactatatatatttgtacacagtttgcacaatttgtgtactttgtacaattatccccaagaagaatagttgtcatttgttaactacttcactatttgaatcttacattaacctccaatgaagccttgagatgtgtcttcaatatatttatattctggagaaatcacccaaattgaaatcttaacacaaaccattgaatggatgattactagtgagtaattttcaaaatattttaactaattttttaaattgtgtaatatacattcaaatgaataaaaataatgtattatttgaaaaagtaacagaagtaacatccttgaacctacaacttaggaaatattaccaatattttttaataccttccaggtgctcctcttagatctagtctttccctaccagagtaaaacactctagtgaattttgtgattatggttctttctctctctctctctttctttctttctttctgctttctttttttttttttttttttttgacagagttttcactcttgttgcccaggctggagtgcaatggtgtgatcttggctcaccgcaacctctgcctcccgggttcaagcgtttctcctgcctcagcctcccaagtagctgggattacaggcatgtgccaccacacctggctaattttgtatttttagtagagacagggtttctccatgttggtcaggctggtctcaacctcccgacctcaggtgatccgttcgcctcagcttcccaaagtgctgggattacaggcatgagccactgcccagccgacgatggttatttctctacattctttaaagtcatttttctgattggtttatgaatagtcatgaaatgcagattaaaaagaagaattggcattttatagttaggttttatagtcactcacctgaatgtcatgagatccagagaccaaatagtgacagtggctaagtgcctgggctctggagctggactgccagagtttgaattctagctctgctgcattctaactggaacaaattatttaacctaccttgaataaattatttaattttttagtgccttagtctgcctgcctgcctgcctgccttccttccttccttcttttcctttccttcttccttttcttttcctttcctttctttctttcttttcttttcctttcttgtctgcctcgcctcgccccgccccgccccgccccgcctcgccttgcctctttcctttcctttctttcctcttgctctgttgcccatgctggagtgcagtggcatgatctcagctcaccgtaacctctgcctcctggattcaagcaattctcctgccttagcctcccaagtagctgggattataggcgtgcaccactgtgcccagctaattttgtatttttagtagagacggagttttaccatgttggccatgtttggccaggctggtcttgaactcctgacctcaggtgatccgcctgccttggcctcccaaagtgctgggattactggcgtgagccactgtgcccagccttagcttctttatctataaaattgaggataataagagtacttactcccagaggggtgttacaattattaaataaattaatatatgtaaataaatggaacagtagagtagtagtaactaataaataaatgttagttatttaacaggtagagaaattaatgcaaagaattctttgaaagccacttgtattcttgcgtactatattaagtaatctttctttaaatgtttctgtaatttcttttaaacaactagtatcatgatttttgtcactctgtgacctctttttattcagctaattgtgggactactgaaaattaggctttccttggtatctctttgtgtctcccagcttatgtgagaacagatctcttcttagtttgcaaataaatttattccacatattttttacttggttgttcccctgacatactcatttaagggctactgctgccaaaaatgataatccaaaggctaatttatgtgttttagcctcatgttggtagaagttctttgtaggttatagatgaaacagtttgtctaataaatggcaaattgctattacgtaaatatcaagctcctgtttaagtaaaaaggaggtctgtgttagtgttgtctcttctcagcgttgctattcaatctgtactgaaaaaatcgtgacagttcaatatttacattagaaattggagaaacatgtgtcagagttaaaactgatgaactttgccactgtttatcaatagcaagtaaactggcaaatatgtcagtatgttagcagtaccaagaagctaaatgggaatattttagaagtttgacccattgttgcactctcacatggcagcctctttatcttgttagagaacatcctttgatttcccttttcattctttctgtgagtctgagctttcctttttacctataaatgtgcttatcttatcaaatagtactgcatgttgcccattcctgggacaaaagagaaataccatcctgtatttcttatagcaacccaggtaaggtttgtgtgtgagggagcattttggagaaaagagaattgtaaataaatgggtataatctagttggaaaactaaaaactttctttaataattttaaggtaggtcaagagcagtagtagtcattgtgtatttcaggttaaccaagaaactcctactgccctgtgaaaatttattttcaatgttagcattcctatcaatggataacagttacaaggcaaaaaaaaaaaaaaaaagtcaagtattttccatatttattttattaaggagaacttacattatgtataaatgttagcaccagaaatattaagcctatcaactctctgtgtttcctaagttttatcctgtggtcagcatgataattaatatgttacataatgaaattaaaagtcctcctttctaagcccagaagacagaaaatgaaaaggattaagcctcccttgatcagattgttatttttccttttgaggataggatatcctccatctctattgaaacccaaggcaaatcagaacataggtacccccatctccatggacacaaacacaaatatctaagaagcataattcaacagagagagaatctaagtgatataatgaaggtaataagggtatgggctttatgttggaacagacttgggttcaaatggtgattctaccatttattagctatatgaccttgcccaagttaggtaccttccctaaacctatttgcatctcataggacttgtgagattaaatgagaacatagaaaagaacttagcattccatctggcacataataaatatgtcaagttctttcatgcctttgtacatgcccttttttctgcagcatgcctgaataatttctatagtcttccttcaaaaacaggtggtcaagtttgcagcacttctggtcatgccatcttctatgaaattaagacaacatcaccttgtctgtgatgccttccttgcctttaactctatttcctgtgctatgacctggttatttactctttctctctgagcttccatgtatcttctatatatctctcactgtgcactatttcattgtacatgttgacctcctccacagggctaaatgctggggagcatggactatgtcttttcaactttgtatatgccttactaagcacagtgtttgatatacgataggtgctcagtaaatactcaattgctgagtgaaggtatattactcttgggagcacaggcagaaaagtagtctgtagtccagagcaggaggagggactgggtacaaccaaagatttttttccccaaaactgttattatgaaaattttcaaatatacaaaataattgaaagaattacaaggtaaacatccaaaaacctgccacctagattctagaattagcattttgtgagaatatactatattgccattaattgtaggcatcatgctgtacagtagacctgttagcttattccacctatctaactataattatgtatcctttgaccaacatctcagcactcccttcctcctgaccaccacagcctctggtgaccaccattctactttctaattcaatgaggtcaacttttttttagggtctgcatatgagtaagatcatgtggtatttgtttttctatgcctggcatacttcccttaatgtaatatcttttagtttcatccatgttgttgaaaatgacaggattgtcttttttatggctgagtagtattccattgtatatatatacaccacattttctttatccattgatctgctgttagactcttaggttgattctgtatcttggctattgggaatagtgttataataaacatgggagtgcagctctctctttagtatattgatttaatttcttttgtatatatacccagtagtgggattgttggatcatatggtagttcgaattttaattttttgaggaacattcatactgttttgaatatggttttactaatttacgttcccaccaacaacgtgcaagggtttctttttctccacattcttgccaacagttgttatcttttgtcttttgataatagctattctaacaggagttaggtgatatctcattgtggttttgatttgcatttccaggacaattagtgacacattttttcatattcctgttggccatttgtacgtcttcttttaaggcatgtctattcacatcttttgctcattttaaattgggttgtttgttttcttgctattgatttgagttcctcatataattttcattgttaacccctcatcagatgttttattagttcgttttcacactgctataaagaactgcctgagactgggtaatttataaaggaaagaggtttaattgactcacagttcagcatggtggggaggtgtcaggaaatttacagtcatggtggaaggcaaaggggaagcaaggcaccttcttcacagggcggcaagaaggagaatgaatgcaggaggaactaccaaacacttataaaactatcagttctcatgagaactcactcactatcatgagaaaagcatgggggaaaccgcttccctgattcagttaccttcacctggtctctcccttggcacgtggggattttggggattgcaattcaagatgagattttaggtggggacacagccaaatcatattagatgtatagtttgcaaataatttatcccattttgtaggttgtctcttcactctgttggttgttttctttgctatgcagaagctttttagtttgatgcaatcacatttgtctatttttacttttgttgtctgtgcctttgaagtcatatccaaaaaatcattgcccagaccaatgtccttgagcgttttctctttattttcttctggtagtttcatagtttcaagtcttaacatctttaatccatttagagtttatttttgcaaatggtgagagataagggtctagctttattattctgcatgtggatatgcagtcttctcagaaccatgtattgaagagactgttctttccacattgtatgttcttagtacctttgttgaaaatcagttggctgtaaatgtgtgaatttatttccaggccctctattctgtttcttgggtctagctttctgtttttatgccaatcccatgctgtttgggttactatagctttgtagtgtattttgaagccaagtcatgtgatgcttccagctttgttctttttgctgaagattgttttggctattcaaggtcttttgtggttcaatataaatcttaaagatttatttttctatttttgtaaataatgtcattggtatttttatggggattccattgaatacatgggtcactttggactatatgggcattttaacaatattaattttttcagtccatgaacatgggatatctttccatttatttgtgtcttcaatttatttcatcaatatattacagtttttaatatacagatctttcacttccttggttaaatttattcctaaatgtttttatagctactttattttttattttttatttttaaattttgtgggtacatagtgggtgtatatatttatgggatacatgagatgttttgatgtgggcatgcaatatgaaataatcacatcatggagaatggggtattcatgctcagaagcatttatactttgtgttgtaaacaatccaattacacccttttagttattttaaaatgtacagttaagttattattaactatagtcaccctgttatgctatcaaatagtaggtcttactcattctttcttctttttttccgattaatcatccccaccttttctctgcattctcccaacaactacccttttcagcctctggtaaccatccttctattctgtatgtccatgaattcagttgttttgatttttagatatcacaaataagtgagaaaatgtgatgtttgtctttctgtgcctggcttatttcacttaacataatgatctccagttccatccatgttgttgcaattgataggatattttttaaggctgaatagtactccattgtttatgtgtaccacatattctttttccattcatctgttgatggactctgtgttgcttccaagtcttggctaatatgaacagtgctataacaaacatggtagtgcagatatctcttcaatatactcatttcctttcttttggttatacctagcaatgggattgctggatcatatggtagttccatttttagtgttttgaggagcctccaaacagttctccatagtggttgtactaatttacgttcccaccaacagtgtataaaggtacccttttctccacattcttgccagcatttgttattgcctgtctttcagatataaacctgtagatgttttaaatggaattgttttcatgattcttttttcaaatagttcaccgttagtgcatagaaatgctactaacacacttttataagttgattttgtattctgcaactttactaaattcatttattagttctaagatttttggtacagtctttagggttttccatatataaaatgatgtcaactgcagacagggacaattcggtttcttcctttccaatttggatgccttttatttctttcttttgccaaatttctctggctaagacttccagtactgtgttgaatagaagtgagaatggacatccatatcttgttccagttcagcttttcctcattcagcatgatgttagctatgggtttgtcatatatggccattactgttttgaggtacatttcttttacatctaatttgagagttttaaatcatgaagtgatgtggaattttgtcaaatgattttaatgcatttattgaaatgactttgacttttatcatttcttcttctaatgtgatgtatcacatttattgatttacatatagtgaatcatccttgcatccctgggattaattacttgattgtggttgatgatcttttcgatgtggtgttctatttggcttattagtattttgttgaggatatttgcatgtatgttcatcatagatgttggcctgtagttttctttttttgttgtacctttgtctggttttggtatcagagtaatgctggtctagcagaatgagtttggaagtaattcttcctcttcaattatttggaagagtttgagaagaattggtgttagtgttttaaatatttggtagaattcagctatatttttaaatatttggtagttttttaactatctggctttttgttgataggagactttttattactgattcagtcgtctccttactcatctacatgaagaaatagatgagtaaggagactgaatcagtaatatttcatccttgatcagttgcatatgtacacagatttatccattctaagttatctaattcgttggcatataattgttcataataatttcttatgatcctttaatttctgtagtatcagttgtaatgtctccttttttatctctgattttgagtcttctctcactttttcttagtctaggtgtttattttatgttttcaaatgaacaactcatttcattgattttttttttcctttctttttttttttttttttgatatggagtctccctttgtcacccaggctggagtgcagtggctcaatctctgctcactgcaacctctgcctcccgggttcaagcgattctcctgcctcagcctcctgagtagctgggattacaggtttttgtttgttttgttttgtttttactttccattccatttatttttggtctgatctttattttctttcttctgctaattttgggctgagtttgtctttgtttttctaattctttgagatccaagattaggttttttatttgcaacctgtcttctttgtaggcatttattgctgtaattttccctctcaaactgcttttgctgcatcccataggttttggtatgttgtattttcattttcatttttctcaaaaaaattttaaattttatttataattttttcattgacttattgattgttcaggagcatgctgtttaatttccatgtacatgtgaatttttaaacgttcctcctgttactgatttctagttttatactacggttggagatttacagttttaaggaatcctgcacttagacatctttcatgggaaaggggaagccttgagaatatacttatcattcatgtaacatgctttgtcatgaacaaatctcagagttcctagttcatggaaaaggaacatacaggctactgtattcaggaatattccaaatagggataggattcgaacttttccataatttctttccttttttctttctgtattctctctttatcctacttccaacccctaatacatacacacataagagtgtatgagggttccctttcctccacatccatgagctcacatacacccatagctctagataaaagtacaaattaagcaatcaaatataactatataaattaaataaaattaaataagtaaaaggatactaattgatctttcaagattaggcagaggtctggaaactgatgataatgaagaaaaggtcatttcacattcattagataacgattcccatgatctaatttttctctcatttgaacagagagtgataatatcattagcagaaaaagttaaaggagaacaatggaccataatatgatttttttttagactgagtgattgcctttctatttactaaaagatctgaaagagtttacaaaattaaaacacatgtaaaaatagataaacgcagtgaccaagatgctatcaggtacctgagatgagctattttctacagttgagtaacgaatttgattattaatttctgctaatgaaagcaaaaagaaaatgctaaattacatatttctcttcttaatgcattctttttaaaaaataaggtcacaattttttttatttttcaggcatagaattggaaaaacataaccagagatacatggttatactaggtatgggaatttggagtaatattgtagacagtgacttcattgtgcttttataaaagatgcatatgtggtacctaaatcaaaattcttatatggactggggttctagagttgagcatgctgaagtctgaaaggctgaatatgtaatgtcaaatgctaactcaataaagatagttctgtggaatatggtactttgctacctcattatttagcttcacacagagataatatttaaagaatgtagaagtatttgtcatcaataaatcccatagtatgtcttcctcaaggaaaatgagcaaaggatgacttttactgcatataaattatacctccataaacatgatttgtaataaaataaattgtttttgagtgttcagagtttttttttttcttttttttttctttttttaaaattattattatactttaagttttagggtacatgtgcacaatgtacaggttagttacatatgtatacatgtgccatgctggtgtgctgcacccattaactcgtcatttagcattaggtgtatctcctaatgctatccttcccccctccccccaccccacaacagtccccagagtgtgatgttccccttcctgtgtccatgtgttctcattgttcaattcccatctatgagtggaacatgtggtgtttggttttttgtccttgcgatagtttactgagaatgatgatttccaatttcatccatgtccctacaaagggcatgaactcatcattttttatggctgcatagtattccatggtgtatatgtgccacattttcttaatccagtctatcattattggacatttgggttggttccaagtctttgctattgtgaatagtgccgcaataaacatacgtgtgcacgtgtctttatagcagcatgatttatagtcatttgggtatatacccagtaatgggatggctgggtcaaatggtatttctagttctagatccctgaggaatcgccacactgacttccacaatggttgaactagtttacagtcccaccaacagtgtaaaagtgttcctatttctccacatcctctccagcacctgttgtttcctaactttttaatgatcgccattctaactggtttgagatggtatctcattgtggttttgatttgcatttctctgatggccagtgatgatgagcatgttttcatgtgtctgttggctgcataaatgtcttcttttgagaagtgtctgttcatgtccttcacccactttttgatggggttgtttgttttttacttgtaaatttgtttgagttcattgtagattctggatattagccctttgtcagatgagtaggttgcaaaaattttctcccattttgtaggttgcctgttcactctgatggtagtttcttttgctgtgcagaagctctttagtttaattagatcccatttgtcaattttggcttttgttgccattgcttttggtgttttagacatgaagtctttgcccatgcctatgacctgaatggtaatgcctaggttttcttctagggtttttatggttttaggtctaacatttaagtctttaatccatcttgaattaatttttgtataaggtgtaaggaagggatccagtttcagctttctgcatatggctagccagttttcccagcaccatttattaaatagggaatcctttccccattgcttgtttttctcagatttgtcaaagatcagatagttgtagatatgtggcgttatttctgagggctctgttctgttccattgatctatatctctgttttggtaccagtaccatgctgttttggttactgtagccttgtagtatagtttgaagtcaggtagcgtgatgcctccagctttgttcttttggcttaggattgacttggcgatgcgggctcttttttggttccatatgaactttaaagtagttttttccaattctgtgaagaaagtcattggtagcttgatggggatggcattgaatctataaattaccttgggtttttaatagctgaaagactgcattgccattacctggttcttagatgtcatggaatctatgtgattcaggccacgtgctgaattataacccaaacatagtggtacttaaaagcccctgtagctctcatgcttctcctaatagaagcttttggctgaaacaagaaacgtttttgaaagaagcatattgtcattatccttttgtgaaattttaatagccagatttgtattcttattcatatgtaacaaaaaccttgctagcacagtggtgataacagaggtacctgcaagtaaaactgagggttttttttttgaagtaaaagaaagaaaaagcagctttgaagcaggtacttacacaaatactaccttgatttaccacatatctgtaatggatggcctgggagtagtgactgcagcctgaaaagtaatttagggcatggggtattaactgatgaccttatccataaaatattttagttatcctgtggaagttctgattttagttgacaaaacagaagcttctatagacctgtatattgttgagactacatatattattctaagaaggcttttgaatagatttgctgagtgtagttgatgaagatggcccttttaaatattagggaattcatactagatttactgtttcagttttttcattacagattttgagaggcttctcctggtagtaaaatgtcagatgaaactgttactgtagaattcactaggttactgattcagtttgtgagtattagaaaatgttcttccatagagattttaaatagtttttgtgacaaagcaaaaacaaagcaaactgaagttttccctggattgaagcagccgatcaaatattttaacgtttggagtttcaacttctaagtgaaaagattcctgattttaaaatataaaaggattatttgagaagcacgtactttgtgtatgaatgaagaaatgtatctattttccaatgaaagtttatattttggtgactgcttctactgaagtgatagcatggtcagtagtattccaacatctttggatactgttagcttcagccatcatatggtttgattaattgaactggtgtaatagattaatagatatggtggtatctatactaatctgattttcttttttatgttacataaaatagaatttttccttccttccttcctctttcctctcataatttgaacagatactggattcaaaaaatttatgatagcttaaaccccagggatatcattttctaaaggagtcatctgtagatggtttatgttaaagttggacaaatggatagaacatcaagattttaatatttgtttccacatttgtcccacttacggcataagtatcagggaagtggccagatggggtggctcatgcgtgtaatccaagcactctggatggctgaggcagaaggaacacttgaattcaggaatttgagaccagtctaggcaacatagtgagaccccatctctaccaaaaaaaaaaaaattatccgtgcatggtggcatgtgcctgtagccccagctatttgggaggctaaggtgggagaatcttttgagcctgggaggtggaggcttcagtgagccgacagagggagacctgtctcaaaacaaacaaacaagaatcagggaagatacatattcatttgcttttagaacttataataaaccattgataacaactcaaggattaattaggcctaacatttgagtgtatgtatagcataacacctctgttacaaattactggaggcatttgtgaattatctagttaatttcatctgaagaaagagacctaaaaaggaagctggggtagacctgcttttgccatgtaccccacttcatttcttatggctaaggttgttccacagtggtcctagtttcgaacctttgccttggtagcataaccccaaatttttctgaggctatagccttggagttggaattgcctagatcttcacagaaactattgtgctgaactctattgggttgacagagagctgggtatataccaccccactcacctatcatatttggggatgatgacagttggcaaggattggcaccattatcagtatctttaaaaggtatcaagaaattactggcaagtttatagctttaaatgcctatattagaaaagaagatagatctaagtttctatcttaacaagctagaaaatgaagagcaaattaaaacctagataaatagatggaaataaataataaagaacagaaataaatgaaatagaaaatgtatttaaaaaagaaaaagataaaaccaaaagccagatctttgaaaagattaataaaattaataaatccttaccaagactaatcaaggaaaagagaaaatataagtttaaacttttatgtatgaaagaggataaatcatatacagatattaaaaagtcaattagggactattatgaacgaatttatgtcagtaaccttaacaatttacatacaaaagagcattttttgaaaaacacaaattatttaaattgaaacaaaaagaaaatgaaaatacggatagctctatttccactaaagaaatttaattcataataaaaacctttccaaggagaatactctaggcccagatggttaaagaagaattaataccagtcttacgcaaaactctttcagaagcagagtgacagagaacactgacacacttgttttataaggccagcataaccctataccaaaatgtgtcaggcattaccaaagaagttacagaccagtattcctcataaaatattctcaaaaaacccccacaaaacaaaacaaaaaaaaaagagtaacaaacttaatacggtaatataaaggataataactcttgacccatatatacaaggttggtccagcatttgaaaatcgatatattttaaccacattaaccgaataaagagaaagtaatatgatcattatgttactggtgggtatttgttcttagagttcccaagatggtggcgggctgcttccaagatggtggcaagcctcttgttctctgacctggggttcttggcctcacggcttccaagaaatggaattttgggccatgtggtgattgttatagctctattcagctccattagaatgaaccccaggcacttagcctgcacaggaacaatggcgagcctctagcccaattgggagcggcagtgggcgccacctcactggatcaggagcacagcagacacctgccctatccggagggatggaagtcagcagtgggtgtgcgacagtggcaaacagcagtggtggatggcaagcgaaagctcagcttgagccctaacaaacacagaccagaagagtgtgcagttgcaagatttaagagagtgaaaacagagctcccatgaagtgggaggggacccaaaggggctttccattgcctgctcaaatgcctgggtttatatcccgatcattgtccctcctcctgttctctcaggcgatagatgattggctatttctttacctcctgtttttgcctaattagcattttagtgagctctctttactacctgattggtcgggtgtgcgggtgtgagctaagctgcaagccccgtgtttaaaggtggatgcagtcaccttcccagctaggcttagggattcttagtcagcctaggaaatccagctagcactgtctctcaattgcaatagacgcatgaaaggcattttataaattcagtacccatagaagataaaacatgctcagcaacgtaagaatagagagaaacttctaaacctaatgaaggatatctatggaaaatctgtagctaacattatacttcatggtgaaagacaatgtttgacttctaagatctggaagaagacaaagatgtccttcctctttgagcacttatattcaccattgtattggaatacagtgtaatatagtactggagtcagtgcagtagggcaagaaaagaaggcatatggccaaaggaagtaaaactaacattcacaaacaacatggttatgcatgtagaaaatcctaagaaataataaatggagagagatatatcaggttcatgactgttagactctatattgtgaagataccattctccaaatttacttatagattcaacacaatcccagtcaaaatcacggtaggcatttctgggaagacagtaaattaattcctaaatttatatggaaatgcaaggaatctagaataaactcttttgcaaaagatctaagttgtagaacatagacttaccaggtttttaaaacttcttatttcaaagtggattacagacctaaatgtaaatgccaaaacaaaaaaacttctaaagaaaacatgggaaaaaatattcatgacacaaaaacagggcatgtacaaacacaaatatgaaccataaaagacaaaaactattaaactgaactttttcaaaattgaaacttgctctttgaaaaacagcattaagaaaatgaaaatgcaagccatagactgggaaaacatatttgtaatatgcatgtctgacagtggacttggcaatggtcccattgtttgtgtcccctcaaaattcatatgttgaaatgctaaccaccaaggtgatactattaagagatggagcctttggtaggtgattgcatcatgagggcggagccctcatgaattggattagtgctttaataaaagaggccggaaggatcttgtttgccccttccactatgtgaggagacaatgaaaaggcacaatttctgtgaaccaggaaaccgaccctcatcagactgaattggttggtgccttgatcttggattttgtagcctccaaaactgtgagaactaaacttcttttgtttataagctaattagtctgtggtattctggttatagcatccagaatggactcagacagagttgtatacagagcatatacagaatgaagaactcgtaggaaccaacaataatgagatgaacaactcaattaaacaattgggcaggctgtaatcccagcactttggaaggctgaggtgggcggatcacttgagcctaggagctccagacctgggcaacatggcaaaaccccatccctactaaaaatagaaaaaaacttagctgggtgtggtggggcagcctgtagtcccagctactcaggaggctgaggtgggtcgatcgcttcagcctgggaggcagaggctgtagtgatcatgccaccgcacaccagcctgggtgtcagagccagaccctgcctccaaaaaaaacaaaaaacaaaaatcagcaacacataattgggcaggaacttgaacaatcacaaaagaatatgtatcaattgtctaaaagtacatgaaaacattttctataccattagccaccagggaaatgaaagtcaaaactacaggaattaattaaaaggaaaaagactgacagtatcaagtattgacaaggaagtgaagcaaggggtgctctcatatgttgctgctaggggtgtaataattgtataaccactttgggaaacaatttggcaatttcttataaagataaacttacatttaacatttgaagtttgaacctccattcctaggtatttattcaaggaaaatgaaaatctgtatccacaaacgctgtgtatatatttacagctctattcatactagctgaaagctggaaacagaggaatgaataaacagatcatggtatattcatacagtatatattcatgctactcagcaatgaaaaggaatgaactaccgatgcacacaacaacatgaaagaatctcaggaacgttatgctgagtaaaagaagctagacacaaaagactacgtattatatgagtacattattgtatgattccatctatatgaaatttttttaaatgaaaaactaatatattgtgataaaattcagatctgtggttgcctggagtggaggtgtttgaccaaagagaggcatgggggaacattctggagtgatggaaatatttataatggcagggctacataaatgccccagctcaaggaactgtacaattaaaatgtatgcctttcactgagtataaaccatacatcaataaagtttatgtttttgagtaaaagggagttccagactctgtgctctgacaactttggcacatggggaatactacacttactctccataggttaagccttcctagttatctttgataagccttgtcctagacagagacaatttttatactgacaaaatcaaaatacattctattaaattaaatggaaatctcctcactaaaatgaagtacaacacatagatggaatacatgggatgagatacatatcctggatttcagtagtattctttgagagtcttttaaaaatatatttggcaggccgggcatggtggattatgtctgtaatcctagcactttgggaggctgaggtgagaggaacacctgaggtcagcagttcaagaccagcctggccaacatggtgaaaccctgtctctactaaaactatgaaaattagctgggtgtggtggtgggcccttgtaattgcagctactcagggggctgaggcaggaaaatagcttgaacctgggaggtggaggttgcagtgagctgagatcgtgccattgcactccagcctgggagacaaagcaaaactctctctctctctctctctctctctatacatacatatatatatatacacacacacacacacacacacatacatcacaacaactaaatttttaaaaaaattctaattcagggttcagtgactggaccatgaagcctatttttgtactgccccaatgtaagaatggttttacattttaaaaagttgtttaaaaaaaaaaaaaaagtcctgtcccttaagaaaaaacaagcaaccagtactataagtgttcctcaaagtctacaatatttactatccaaacttttacagaaaaagctttctaactcctattctttaccctttgatctgcacactctacctactgtaactgattcagcctcaaaaactaacatgttgtctttttgtttgcattagagaatcctagatgtttgaagtactaattagtatacactaagcctatggccttatttcctttgctctgaaaactaagagggaatgttaagttgaatgatatgatagctactttccaaggaatgctgtatttcttacgaattggcctctttggctgtactccagatggcctggttagaatgacgttaaagctgtggaatagccaaagcacttgaaatatcagttatgtatgtagcatgaggctgtcagccattttgcaaaaagcatgggacaatgctaaatatttctggtttgccccagtggtatagattggagaaccatttttactcttcagccttcatggaaaatggcagggtagtttaaaaggtctttgagaagttttggaggttctaaaggggttttttttttttttttttttggcatggggttgtcagaatagcggatttgcacttctgtctcagcaatatcaagatttcccccttttagtgcatttgaacccacacttcaaccttagaatcttcttactctctcccaccctttgcctctgcctcctgtggcctcatacagctgatctcaaaccataatagatcttttaatattaacttaggtcctctgagcatctctttatttcaaaattttaaagatgaacctgggataaagggacatagagctgctttaggaaatacacagcctctttggggatctcactgtgctagtggtatacagattcaagttgaaagaccagtggaattgtggttgacagcccagggacaggaacaagcaggagcctggtatgagctaacatttaagttaaaatctgtgactatttacgatatttctttcttttcatcttttctctaggcctactctgtgtatgatgaagacattgggtactgtcaagggcagtcttttcttgctgctgtattactgctgcatgtaagtaatggtccgtgtgataaatagcacagtgctgccaagtttattttactttctactggctttgttcttccttcttatttcccatttatctgatggagattacatatggcatatcttttttaaaatgtacgttaggtgataaagtaagagatatgatgtcaaaaatacgacagtttctcaatggaattagttttgttggctagaaaaggataaattgcttatttggagttatttttaactagaatcctctggaattaaagaagtcggtataactgcccaaatatcaggacctggaccattaagacccactatactgtgacaaggaagtcctttatcatttctgtgatgtatttttatatatcctctttcctgtcagttaccttcatttgacagatcatttattgagcatcaattttcaggtactgggctaggaagtggggttataaagatgaatcatttataatttgtgttctcaaagacttcatagtccaggatggggcacagataatgtaggcatgaacttataatttttgttctcttttatgtgtctttatttttctgatgacaaaaataatacatactcattaaataacttacagtatgctaagtgaaagtgatacacaggttaagagaatagagaggagaattacccaaccaagctctgccagaactttcagaaaagactttctggaggaggtggcagctttgtcaagacagaaatgagattggagaaggtgagaggggaaagggagggggtaaagaattattgacaaaagtcacaatatgagaaaatgtatggaagtatgatagggcacagcatacaaagggaacaatatgaaatcacagtttactatagcaattgtacacggggagtggtatgacgtaaaaatggtaagatgggaaattgtgaagactttgtaatgtgtcaaaaatgcaggctttattctagagctaatgaggaaccattgatcactttggagcaagggaataatacagtcatatgatcattttagataaatcttttcatacctgtgtaaagggcagaattaaaggaaacagacagcagcagagagaccaggtagaaaacatcaatatggccaggcacagtggctcacacctgtaatcccaacactttgggaggttgaggcaggaggatcacttgagcccaggaatttgaaaccagcctaggcaatataatgagacaccatcactaccacacacacaaaaggtatctgggtgtgttggtgagcacctgtagtggtggtgagctacctgggaggctgaagtgggaggaccacttgagcctgggaggtcaaggctgcagtaagccttgattgcaccactgcagtccagcttgggcaatagaaggagaccctgtctcaaaaaaataataataataaaaaggaaaagaaaatgtcagtttaaatgagagatgttgagaacccagagaaaagcagaattaagaaacattcagggagcaaaattgttaggttttgtggatggattggcaaaggagcagtcaaaggtgacatatctagtttcctggctttggagactggatgaatgttgtattttgagttcagatagcaaatatatctatggagattgaatgaaggaaaaagtttaggagttgatgatgatgagttctttctttctctctttctttctttagagacagagtctcactctgtcgcccaggctggaatgcagtggcacaatctcggctcactgcaagctccgcctcccctgttcactccattctcctgcctcagccttcccagtagctgggactacaggctcctgccaccatgcccggctaactttttgtatattttagtagagatggggtttcaccatgttagccaggatggtcttgatcttctgacctcgtgatccacctgcctcagcctcccaaagtgctgggattacaggcgtgagccaccgcgccggcctttatttatttatttatttatttatttatttagatgaagtctacctctgtctttcaggctggagtgcagtggcatgatctcagctctctgcaacctccacctcctgggttcaagtgattctcctgcctcagcctcccaagtagctgagattacaggcatgcgccaccacaccgggctaatttttgtattttagtagatggggtttcaccatgttagccaggctggtctcaaactcctgacctcaagtgtgccgtctgccttggcctcctaaagtgctgggattgtaggcaggagccgctgtgcccgtctgatgataagttttgtttctaattatttgagttcaggatattcttgggacatctaggtggagatatatgttcagcagccagttgcatactggagattaatgctggaggagaaatgaaagctgaagtcatgagagtacatcagatcatctagaagaatgaatagagtaagaagattaaatcccaggaacagcaaacatttgaagggctgatgcggaagtaaaatccttaaagaagttcggattctcagtagggaggaagcaatgaatagtgtcaaatgtaacgagaggccaaacaagtttaaaaggacagcattgtttttttgaggtttagcattctggaagtgaagagcaattatagtagattcatggtcctaattctgaaaacctgattttaattataatagttctattatgattttcactttgtttcactttgaggttgatggtttttttccctctgttacattattatctgtttatgacagtttctgtcttcttgttatccttctttctttgatttctctacatctcacctttttgggacttcctgtgatgaccagttactttatagtcacaaattctcaggggcccttgttccccttctaaacccactagaatctagaatagtcaggtcccttccctaagaggctggagaccatacccagtgacatggatgttttcttcaaggctcagagccatctttcttctaaaggaagcctttataattacttggatgagaagctgaagttcaagacatgggtggtgaagctttggtttgaacaaagcaatctttttttttttttttttttttttttttgagatggagtctcgctcagttgccaggctggagtgcagtggtgcaatctcagctcaatgaaacctccgcctcctgggttcaagcgattctcctgccccagcctccagagtagtgggactacaggcacacgtatcaccatgcccagctaattttagtttttttttcagtagagacagagtttcaccatgttagccaggctggtcttgatctcctgacctggtgatcctcccaccttagcctcccaaagtgctgggattacaggcgtgagccaccacgcctggccacaaagtgatctttgaacataccgtagtttagcattttttacctgtagccctgtttaacatattataatatatttattaatgttcagtgagaagaatatctctctgagaaatctgttttggatttgacagaagtttgggtcaattataagttcataattatttggaaacaccctccccaccccgtccgcaaagagagaaagagagagattcaaataacgagagctcaaatacccagaattttttttctacattaggtactctactattataagggccacgtagtgagtcagcctttgtgaactccaacaagatagcttccagtgtatgttacaagagagacagaaattcagtctagtctctcacactttctacattaatagaattattcagtgttgtcatggcttttataaaaataacttgaaatatagaaatccttttagaatccttaaggaacaatgaactgatattcagcattctgttaatgaaaaacatattctaatttttaattggcagtatgtttgataattctgttaattagcatattccattaactgaccaacccatccattcaaccaatttgaataacagaagttaactgtaatttattttttactatatttttgtctccctggtttaaacaaatagaagaatacggactggtttaaacaattcatcaaacacactatctcaggttccagggagatacattattagggtcttactgactaatttgttatcagttacataagctattgcttctttttgctgccagacatctttggaagctccatattaatcactgtgagagcctgcttccttttgggttctgtcctttcctcacccatagtcatttatatttcacattcattgcctgagaagaaagtaagaccaaaaatgaaagtatgttcaaaaacagttttgaatttttaggattttttcgtgtctaagtagtctaaataaataattagcctctccttgtacttggaaatttctagatgctttgacaatagctttgtaacatgtagtagtttagacaatggaagaattaaatgtttatcacagtagactcttacatccatttatgaaattacaagaaatttgtcatttacagttggagaatgttatagtacagattgcctgcaaccattataatgttcaactgcctttgtaatgaaatatacaataataatttctaatttcataatcatgatattagtctttatctcttagtcttaataaattatgacctgattatatttcacttactctaaaaattatataaaatattttagataatttgtaacccaataatttttctacaatatttattgttacaagttttaaattttttaattgaacatgtacctttttagacattcagaagtttatgttcatttttaaggttaaattactgtatgtatactaatattggcatttatagaagctttccaactgcaagaaggattatgtttgaataatctagcatgtttaaaactattgaatttttttaaaaaaactatgactaggtacaattcctttcgaaaccaatttggctttgtctgataaagatatgcacacccagaagttttgctcctagacgtaccttagtcaaatttacgcacttgtacatcaaaatacatgtattacttttgtcctaattaatagtgtttataacagtcaaaacactgaagcaactcaaatgtccactactaaaatgtccaatattagaattgtaattagacagtaagatggctaaattatgatattcttagagtatgaatgccatacagcaatggaaatgaatgtttcacactacattgattcatataaatgaatcatataaacataagatttagtttaaaaaaagcaaagtacaacattacatttggtatgattccattctgcataaagttcaataacaagcaaaactaaattctatttttaggatgctagatagatggaaaaaactataaagaacaccaatgaagtggtaactgttaaagttacgaaagtgatttctctagggagaaactgggaatcatgactgaaaagagacagggattttcagggctatcgacagtattctctttcttaacctagatagtggttacatgcatcctttgtaagtttttttagtttataatcaagtattaattaaagtgtacatttaacttttatacatttttctgtttgttgtatttcagagtaaaataaaattaaaaattataaattttaaaatatttctcaccaaaaagacaggtttgggataagatttaaccaatggaagtaaataagaagcagaactacctattacagattccagagtccaaggtgacaagataaaggcttcattttgaagtctctatcgtatatatatatatttataacatatatatatgttaagtatttgtggcattatattattcaagactctttctgctgcatgtgacagaattgactcatataactgggaaatctagggtcagagatgatttttcacatgattggactgcagagttcatattttgtcatcaagaatctgtatctctgcttttcttgaattttattgtcttaattatgttagtagacaaaaaagtggggcaaaatgactgttggctggcctggattcatatgatcaggacaacttcatttaaaagggactattttttgctacctcgtttaaaagggactgtcttttgctatagctcctgcatttatttaaagtgacacacaacaacaccaccaacaactccctctgtttttcttcctgttggactttggcctggttgggtagggcattctaattgtcacagcccaggtctttagtcaagatcagtgaacaccatcagcccctcctaaacaatggaatggtcttcctataggaagaggggttttgatatcagatgatgggacagtaggatgctaaacaggtacatcacatcatcttgagtgatatacttactacaagatttttagtgtatttaaaaagtaagtcctatacttccaaatcacttttccttctagttcaagagaaagaagcattcattttcctattccaagttaattcttatgaagtgcttttgagccattttccaacatctccctgtgtcctaatacacacaaacattttacctatttaaaaaatatttaactactatcttatgtctctctgcctttttgaagctgaactctttcaaaggatactgaaaagtacaactgtgaatttggattgtggtttaatacctttcaagttatatggctttgggcaagtttcttcaactgagctttagtttcttgttatcatccttctaggcttattatgagtattgagtaccttatgatgagtgtaaagagtcttacatattttgtacctagcacaaaaataatgcagttatgagattaaaaccaggctttacttaatagacctatagttactggcaagtcatttaacttctttgaacttcactagtattatatttataatgtaaaaataatgcctaccttgcaggatttttgtgaatatcaaatggggtcatgaatgaatatgtctaataatggtaactgttgctgttattttttaaattaataattatttgcttttacattaataattatttgcccagccagttttcttttggtccctggtccaactaatttgaatggattacacataggagactaatatatcatacagtgatagaattttatggcttatacattgacattcaatttaaatgtattaagctatttgatttaaagggagaatagacaaatgactagaagttttcattctatttgctttttaatatgtaaacaaaaaatgaagacatgataaataaccttgagtttgaaggttcaccagcattcatctttttttttttttttttttttgagacatggtctcgctctatgacccaggctggagtacagtggcaagatgttggctcactgtagcctcttctcctgggttcaaggaatttttctgcttcagcctgccgagtagctgggattacaggcacatgccaccatgcctggctaatttttgtatttttagtagagatgatgtttcaccatgtgggccagcctggtctcgaactcctgacctcaagtgatcacacacagcctcccaaagtgctgggactgcaggcatgagccaccatgccgggcccattcatttttgttgaagaaaattgggaatatcagtagagtgttcatctccttcatagagaaaggtagatcattccaaaaagatgtgaaacacatcatgtgaagcaggaaatttagttttacactaactatggggattactttaaattatcaaaatgtagttttacttcaaaaaataccttgatgtaaatgatttcaggtgcatcttaaagacttgaaatacttagcactgctttgttttatagtttcttgtggagagaagtagtgagggcttggagattgtctccattcagtgatcatcacaattagtacagatggcagatcattatcaacatttattaccaaacggtgattacatcactcaattctcaattatgcatgtgaggcaggtatttttgttttgtatttcataaagccatggatgatattttgatatcttaaattataatattttaatgtttatcccctcttttccttaatgaaataacactggtgataaagtttctgtacacagcaaaaatggacattcagtcttagagacccaccatattccaacaccttaatattttatttaaagatgtgttgttcaattatgtatttttattgtaactttagaccaattgcataaattggataaattggattatcttattctatgaagcattaatcattgtaataagttaaatagtcattttagtgctttttttttaagtaggtaggtaccaccgtactacctcgtggaggaattgcacgtactaaggtgaagtttgacagtacaacctagcattgcatctcacatcttggttgattttctttatgccgattgagggataagctgaatagtcaacacaaaatatagataatataaaagctttttatatttagcatttggaatagaattacaggaaatcaagtgctaatatagttgcatttggctgccccttgcttctagccttcacaccaatactttccttctacatttttgttggcagttaccaacagattgccctacttgtgtggtatgacttcattaaaaaggcagatatatgcagaattttgctagtttatcttaaagaaatatttaacacttgatatttattgaaggttctatgccaagagttgtggagcggggggtacaacattaaagtggtggttagaagtgcacaaataactgtaatggtatacaacaaagagttttgggattcagagaaagcaggggtctcctcacgttaaagagaaataacaaagtgccacttatgatcagttttaaaagatcagtaatattttaaaggcagagctgtgctatagagtatatcccaacccagttattccctctgagcttgtatacaaaaccatgtggagaaccttgaaactgcagtttgtctgagtcataaaaagcatggggaggaggagggggacattcttcctagtgatacacaagaaatgctgtcacttatatgaaaagcagcatatttttgctgcttcatgttatcaacttaaattccagcaaatcattttaacagaaagatcttagagtaaaaattttacctatgcatctgtttattcttttgagtatccttgtataaagcactttggtaattgtcaatgtataagacagagtctctgtctttaaggaaggaaagataagagaaatttacatttagtgattgccaacaatatgtatatgttgtctcttaaatatatttcacttaatacttgtagcatccctatgacataggtattattatttctaattttttagaagtaaaaaaaatcttaggcattaaaagaggttgcctgctcaaaatcacccagcgagtaattaaaaccttacctgaaattacatctattggtataattccaaaatcatgtatttctcctgcagcgccttttgtatattcatgatctgtttctgggcaaagttttgagaggaatgattgaatataggttcttgtagattatacctttatacaaaagaaaagtgatagattcttagtaaaccaaaatatagttgtccctcagtattgggaactaatgaggaattggtagcagctgcgtgaccttactaaaaataaaaatcagatccgctgctgtaaactcttcactgatttcccactgcacttagaatacattcctaactctttatcatggtcatatcagtgctgtgctacagccaggtcataccagcttttgacggccaattgttaaattttcaggaattctgtgaaccagttgttaagcacagccattgttacaaattaaatgataaaaacttacagttaaataactcatgttaaaaacaaaagtaataagtactcaaaattcatcactttctggttatgttaccactttttactgttgtctgtgctcttgaactatttacattgttttatctgtatgataaaaatggtatatgatggtatgctgcagctctactgttatgcatcacttttctttttttttgcaaatgatattttattttatgcaatttgtttatttactcattcattcaattgcttatttaatcattccttaaaatatataagctgagagctgactatatggatggcaccaggcaaatacaatagatacagtagtgaaaaaaataaacatggtgtcttttgttatggagtccaaagctcagtggagcagtgagtgatactaatcaaacaactgcacaaatgcatctataagtaaattattttaaaagtacagttaaaggaaacaagtaggtgctattaagtacatgatataatatcagggttcaagaaaattttcagagcaaatggcaaatgagatacatatattcagtctgcccttcatgtctgcaggttcaaccaatcgtggatgaaaaatatttggaaacattaataacagtgtaacaagtaaaaatataaataaaaatacattgtaatgacgatttacatagcatttacattgtattaagtattataaagagatgatttaaagtagattactaaaatcatctacttcagtaatgttatatgcaaatataacatatatggttacctgcaaatactgtactatgccattttttttctttttttattttttatttattattattatactttaagttttagggtacatgtgcacaatgtgcaggttagttacatatgtatacatgtgccatgctggtgcgctgcacccactaactcgtcatctagcattaggtatatctcccaatgctaaccctcccccctccccccaacccacaacagtccccagagtgtgatgttccccttcctgtgtccatgtgttctcattgttcagttcccacctatgagggagaatatgcggtgtttggttttttgttcttgcgatagtttactgagaatgatgatttccaatttcatccatgtccctacaaaggacatgaactcatcattttttatggctgcatagtattccatggtgtacatgtgccacattttcttaatccagtctatcattgttggacatttgggttggttccaagtctttgctattgtgaataatgccgcaataaacatacgtgtgtatgtgtctttatagcagcatgatttatagtcctttgggtatataccgagtaatgggatggctgggtcaaatggtatttctagttctagatccctgaggaatcgccacactgacttccacaatggttgaactagtttacagtcccaccgacagtgtaaaagtgttcctatttctccacatcctctccagcacctgttgtttcctgactttttaatgattgccattctaactggtgtgagatggtatctcattgtggttttgatttgcatttctctgatggccagtgatggtgagcattttttcatgtgttttttggctgcataaatgtcttcttttgagaagtgtctcttcatatccttcacccactttttgatggggttgtttgttttttcttgtaaatttgtttgagttcattgtagattctggatattagccctttgtcagatgagtaggttgcgaaaattttctcccattttgtaggtttatgcatcacttttcaactccagtccatttattttctaatattctactctgatctcttcccctacctcctctttacgctcaataattcatggatttgcccttttgaggctattttctagatcttgcaggcatgcctaatgtctttttattctttttgttgttgttgtttctcctctgactatgtattttcatatagcctgtcttcaagctcactgattcttctgcttgatcatctactgttgagagactgatacatttttaagtttgtcagttgaattttttagcttcagaatttctgcttaattattttttattatttcagtctttttgttaactttatctgataggattctgaattttttctctgtattgtcttgaagtcattgagcttcctcaaagtagctattctgaattctcttaaatgtcacatatctctcactccaggattggtccctggtaccttgtttagttcatttgatgaggtcatgttttcctgggtattcttgatgcttgtggatgtttattgatatctgggcattgaaaagttaagtatttattccagtcttcatagtctgaacttatttttacccgtccttcttgagaaggctttccaaagggaattaagtgttgtgatctaagtctttagtcactgaagccatatctgctttaggggatgccccaagccaaataatgctgcaatttttgcagactcgcagagatatagccttggtgggcttgggtaagatctgagagaattcctaaaatctctttttctcttctctcactttcccctgaataaatagtgtttttttctcctcatgctgggcttcctggagttgaggagcagggtgacacaagcactagccaccacagctgggactggctactatggctgcaactgcacttggtcacacctgaagccagcatggtacctgacgactactgcctggctgctgctggtgtttattcaaggccccagggtctttccattcagggtagcaggtttccttctggcccaggatggatctagaaatgcttttcaggagctagggtctggactcaggggattcaggactctgcttcatgttactgtggctgagccggtactcaagttgcaggacaaagtcctctttactgtttcctctcttttccacaagcagaaaaggagtatctcccaagctgccctgcctggagttggggaaggggtgtaagtatagccactcttacttttttgttgttgtttctatttgatcccttggctaccccagctggtgtttcactggattgtatgtaccccaagtccactggcttcaagcccagcacagcaccaggacttgccggaagattgtaatactcgtggcctagactgcttttcaaatttgttcaggacaccagggcactttagtctaccagggggcttcccttctgtctggggccagtctgaatccttccttgttgtgtgcctgctaaattctgccctgtgttgtgttctgctgtgacagggcagcactgagtaccagtgcaaagtcccacaatccctgctctctccctttcccaagtgcatggattctttctctacacagtgctggggggataggataggtgtggtgtagacgatgtaagactgttttttctatcctcttccatgccttcttccttgatatcatgttaaaaccaggtactgtgattgctcacctgattttttgtttttatgaaggtgtttcttgcgtggatagttgttcaatttggtgttcttgagggaggatgattgctgaaggatgattgctatttggccatctagctctgcctcctccaaaattgtctctgatgtttacctttacttccaacacccaacattccctagtctaggacttctgcatccttatgaaactcaagtagagttgcctgtttactcttcccctagggaggcactatacctttatctctgtatccctaaagcctagaacagggcctgcacctcatctgttcagtgactatatgtatgaatgccaaaaggcacataaaccttttatttgccctaatgattttaccacattcaaagaaataaaaacatattccctttataagacatcagatggtaagacatttacttagaaagagagagacttaagtgaattagtatctctaggactggctacagttcagttatcttttttttttctctctctcttttgagatagaatctcaaaactccaggctggagtgcagtggtgcgatctcagctcactgcaacctccacctcccaggtcaagcagttctcctgcctcagcttccccagtatctaggattacatgtacacaccaacatgcccagctattttgtatttttagtagagacggggtttcgtcatgttggccaggctagtctcgaactcctgacctcaggtaatccacccaccttggcatcccaaagtgctgggattacaggcgtgagccaccgcgcccggcctggctacagttatcttacatgcagctattttgtatagccatttgagtagagatctgagaggaagatgaagaggcttacaccttggtaagagaagtattcttggccatatatgttcaagttagtgtcacttgaggctttgatgacaaaggagtaaagaatacagtgtaattgtatcctaaataaccaaacggaagctgaaaaatagttgctaacttgaatagctgaggtcagtggccagaaattttgaaaaggtctcaaacaactcatagataaaaagaaaataagcaaatatttaaagaatcaaaatgaaaacactataatgtatttatttaacttcaggagatgttatttaacaaatttgggtattttgtggtttataattagaaaatagaagtggctgatttgtatgaaatcttgtacaactgcatttctaagtggataaatggaactctacttgattcacttgctgaagtatgaagttagtctaacaaatgtatgaaataccataatcaaccaaatgtaaattttcaaggaagtaatatttaaagtagatgtttgtataatagttacatcctaggacattgaataagtacaactttttctgtatgcttggtgtaatttctagaatattagatatgtccctttccatattctttcacctgttgataccactgtttagaggtttgttcctttgacttcagactttattccctgttcagataaaaatacctctgagaaagctagtatgttagagtttactggccatttccctgaaaactgtattttacagaaagtagcaacatcaagaaaacgcagggaggatagtctcacgctatttaccaaaatttaaaatgcatttattttttcacccagcattcccccttttgggaatgtgctctaccccaccccatttttgcatatgtacaaaatgatacatatgcaaggtttattgaagctttatatgattaaaaaattaggaacatctcaagtatcaataggaaacttgttaaatgagctatagtacttttatataatggaatactatgtaattgcttttaaaaaaataaagagacaactctttatatactgagatagaaagatttccaacatatattgttaaggaaaaaaatcaagatgtataacaatgtatatagaatattatcttttatgtgggatgggacaaaataaaattaaaaatgtaattattttatttgcatagataatcagtggcagaatacaggagaaattatttagagtagatatgaggctatgcaaaagaggttggggggtgtaggtaccggggattagtttatatataatgatagggaggagcgagacttttacctttagatctttttacattgtttttattttattttattttattttttttttagacggggtctcgctctgtcacccatgctgtaatgcagtgacgtgattttgctcactgcaacctccacctcccaggctcaagcgatccttccacctcatcctcccaagtagctggactacacactcatgttgccacactcggctaatttttttattctttgtagagacagggttttgccatgttggtcaggctggtctcgaactcctgggcttaagtgatctggctgccttggcctcccaaagtgtgctttggttttttaatcatgagtgtattgcctgtttttaaaggtagcctaatgaatgaatgacaacatgattaaaattaacaaaagaagataattcatctcaagtaaggaggtcatgtcactctgccaaagactggctctgaaggacttcatttgctccaggccttcagctacttatgcagaggactaataacatgaaggaacttttttgacattctggcaaaatgccacttatttatattgtatatgtatatatttttctgtagatgccagaggaacaagcattctgtgttttggtgaaaatcatgtacgactatggtttgagagacctctacagaaacaacttcgaagatcttcattgcaaattctaccagttggagagactaatgcaggtaaataaaaattaggaacttttatcactcagggatttgttgagtcatagaaaaagcctaatagagttggtaagcaataatgaattatagaagtttaatggaatattatagaaaatgtacatggatttagtttcagaccaatatctacattggtctatcataatatgtttatttagccattttactattttaaaaatatctcacattttaaatgttcaagttaaatatactttgaagtgagaatctaatgagtttaatcattaagagattgccaagtattgtttgtagaggaatggagatatttacagagtaaaaattgaaatacctaagagctttctgcatactaattagcaccacttccttatttgagtccacgtagaacacttggaaaagccagaaagatattcataagagaataaaacatactaaaatactgtagggatacatttaaaaatttttaaatataattcctaatctcaatgttgttgttgtgctttacaatgcgtatttataaatgtgtgtgagaaacatgcatccttttatatataccaaatattacacagtaaaaaagattgtgaccacaggcaaagtgattgaccagagctgacaaaaggaatttttaactagctttggagttctacctgaagttgataatcttaaatttataatgggtttttgtggcatgtttatgtgactttgtttaaaaggggttttgggaatccaagagaaatgtgaaggagatacatggatggattgattccatattggggaagggtaaaatggttgaggaaggaggttcgtggaatgtgagagcagaagatgctagtaggagctcattgatatgaactgccaggggatccgtaggtgtctaaagagggaagtgaagccagtaggagactgagagattagaagaacagggcagtagaggatgaatttgcagtgaggttaaaggaacaatttattgggagaagggaatgtaggagggtagaagactttaaaattgaaaagaaataaaaggaggcagggatgtaaaacgagccataagtacaatgacaaatgggcattaaggaggaaaaagactatgtagaagaatctggtaaatatggatattaacagcaataagctcctttttaacgatttaattctaccaagtaaatatttgggattactcgctttttgccttttatttaccaaaaaattcatatattttcaaaggtcagtattcctaagggctttgagaatcaagtaaatatacctaataaataacagatgtgtggtactatgaagaacctcaaccacatttttctgttagcagttttttttcagttaactgaatgagcatttggacgttccatttgaagtacctaatgggcacatttggctatttttcaaagagagcatgtagttcaagaaatggcttattttgttttttattcttctttttgtggtctatttaggaaaacaaaatgaaggtggcctttgtctttcagttatggtaatagctatgctaatactttgtaccttgctgttcatgcttttgaaaaccatttgcttgtttaaattgggagaaaaaaataaagttaccataaaggcatttttagaagatatccaattttatatattatacctttgcataatttctttgctttgccatttttaatatgctgaagacagatttctaaatagtttgtcgtggcttagaattttctaagtgttcaaaaaatatactgaaacatcatagaccccagattagatgatttccaaagagaagatacatttcttttctagctagttaagaattgaaccctgggctgggtacagtggctcacacctgtaatcccagcactttgggaggccaagtcgggcagatcacttgaggtcaggagttcgagaccagccaggctaatatggtgaaacactgtctctagtaaaaaatacaaaaaataatcgggcctggtggagggtgcctataatctcagctacttggaaggctgaggcaggaaaatggcttgaacctgggaggcggaggttgcagtgagccaggatcatgccactgtactccagcctggatgacagagcaagactcttatctcaaaaaaaaaaaaaaaaaatttaaccctgaatggggatgctatgacttgaccctggagtcaagatactcattacactacagatgctctggtagaatgagaattttgcaagaatcaagaacagtcaagtgagcaagagatggtctttcttagttgtttataataagtctgtttttattttcctcaattatctgtcatatccctaattctcatctgctgtcatcacttctgtgcagttatacaagacaaccaatactagaatagagttacagcgatcatagaaagctgtttgtaagttgcagttgtggcaggaacttcattgttctgctgcaagcttctcattgctcctaaattttccactttgacttttaggaacagctaccggacctgcatagccatttttctgatctgaacctggaagctcatatgtatgcatcccagtggtttctcactctttttactgccaagttcccactctgcatggtgttccacatcattgacttactgctttgtgaggtagagtgactcccatctttcactaagccaaaatagaaagtagtttctactaaaaatggttacagttttcttccttttgtttttgcctgtgacattaagccataaatactcactgaccaaaaagctgtatttgaattttcagtaaaaactattttaattgtaattttattatttctgaggaatgaaaatgttaaggcatatataattcctacaaagtaaaatgggtgattaaatttgcataattaaattcataataagcctatatctgtataataatgttttaccagtataaaatgcctttaaggttaaataaatgaatttagaattgggtgttttttaatattaatgcagttatactgcaagagtgaatataaatgagatttttataataactaatttctcagttcatcagatatctttctgtttatcatgtttgggactgctgcgaaatgatgagacaaatgataaactaaagctattatgtcatataattatatttttatatagtagaatatttcaaaaattagtttgtaaaatttcttaggtgtttatatttgtgtattttattgtttttagttccttagatggctatatttatttactcttttaaagaaataaacagtattatgcatatatatggcttatattggtcatcaaaatgtttgactatcttagcagtaatagggaatttgctagataagaagtgtatattttcaatggcagtataaatgtatataaaatatagctatcttaaaaagcaggactaatcaaaagtataagcttatctatgtgattataagcttaatatataatctagacagttttgtattactatgcttcttaaggtaaacatcctttaaaaaaaattttttttgtataaatttaaggggtacaagtgatgttttgctacgtggatatattgtgtagtggttaagtctgggcttttagtgtaaccatcacttgaataatgcacattgtacctgttgaataatttcttatcccctacccccctctcactgtcccatgtgagtctccaatgtctattattacaaattctgtgtccatgtatacacattatttggcagtatttgactttctgagttgttttacttaacataatggcctccagttccatccatgttgctgctaatgacatgattttactcttttttttggctgaataatgctacattgtatgtacataccacattttctttatccagtcatccactgatggacacttaacgctgattttgcatctttgctattataaatagtgctgcgataagcatataagtgcacgaatctttttttatacactgatttcttttcctttggataggtacccaatagtgggattgctggattgaatggtagttctatttttaattctttgagaaatttccatactgttttccatagaggttatactaatttacattctcaccagcagtgtggactcttttctctacatcctcactaacatctgttattttttgactttttaataatagccattctgactgtcataagataatatcatgttatgattttaatttgcatttctttgataattagtaatgttgaacattttttcatatgctcattggccatttgtatatcttcttttgaaaaatgtctgtttatgtcctttgcccgctttttaatggggctagttggtttttctgttgtcattgagttgtttaaagatttctctttcttttcgtttccttttctattctcttttctttctctttttgagatgtagtctcactctgtcacctaggctggagtgcagtggcatgatctcagctcactgcaacctccacctgccgggttcaagcaattctcctgcctcggcctcccaggtagctggaactacagacacacaacaccatgcccagctaattttttgtatttttagtagagatggggtttcaccatgctggccaggctggtctcaaactcggtctcccaaagtgctgggattagaggcatgagccactgcttccagccagattcctctttcttaaaaggaaagtctaatgattttaatcacactaggaattagaagtttaaatgtaaaaataagatttaaaagatgcaatgtgtaaactatataaagcataaaaatgttatttctcagcctactaaaacagtaacaattatatatgcaggcaaggctggtcttttgctcttcagtggctttagttagtacttgcctaatacctgaaggtcacagggcatttgtaagcatgtaagagttttaatcatttgtactgtactttgataaagaagggttcagtgacttgccaggcttgcagaataggtttccaaatcctgaatataacagctagagaatctgatttataatatgttaattctccgacttgttttacttacaaattagtttgtaaaatgcctttctaaatgtatcttaaaggaagaattcagaattaggagctaaaactttattcaaagtcaccatgttgtaatcacaatattcacaaagcatatgtggttatttgtaccaaaaactctacctgattatccaaattggtgtagtgaacagttccaactccgctattttatagggcaatactctttgaaagtataaaccaaattcacatcttcaagttctagaatattaaaataagtgaatgctaaaagttttgataaatattcatagacttttatatactgagctgagtttagtatttcatggtatttcataaaaataggaaagtgggggtatgacattttaacagtttttgagttatatatagtatgagcttgcaaatatttgttattgcttcacaatttttgcagaaagagattaatttcatactagattggttctatagtgttcattgtagaaaagggaataaaattaatgtgcttaatcataaccaactaaatgtgatttctcaatcacttttcctagagtggtatctctgcccttcagttcactgggatggtgactttctaaagtgtctgcccgaatgttggcacccgtggcatcggaacattgtccatgggttttctggaacctagattcaaattttatcttgaagatacatgaatttctaatgtcagttaagaaaactagcaacatttgtgctacagaaaagataaataaatttattagccttcccgtcacttgtcaactgtgacttacaatcagtgtttgaaaggtcataatgttcattaatattaataagaacatcatagatattacctttcctccccttaaacctgtactctatagctgtttaaggaagttggaaaacttttcaaaacatagattgtaatcatagcatcatgatgttcggggaagtaaatggtaacatcctttaccattaaaattgcttttcagaataatctattggaaacaatattgtagtgtgcctcaggatatttattctttccactaactcatctttgtcaagaattattttacaaaggaaatttttgaataaacttttacttcctgcatgtctgtgttttctttttgcccctttccttcttgtagttaataaaatatttatatcaaaagctattatttcatatgtgatgacatattctaagaattggtaaacacagtcttaaatagattatccataggtatttgtttttgtcatattctctgtttttaagaaaacaatttaaattttgaggttacgactcaatgtttacttaaaaatggaaggataggaagctctcaggtagaaaagtattgacttttcaaagttttacattctgatttttaacatgtgcaacatgtttactcaaagatcccattgcaaagtgaaaaagaaagacactgagtttgaaactttatgcttagaagacgtatcatgacatgctttcctaagctatattattttaaagatttcttcattcattctgaggttaagccaataaagttaatttagcagaaaagagaagaattttatagaccttgacaatgcagcctgactgaacaactgctaattattaatagttttatttaaagtatttgcttaaatctgaatatatgataacatgggttagttaattccagaatgatggatagcaatgggatttgaaactggagtttaaaaatacattttcttatgttaagatgagtgaaaatctgttttgattgtcttttagtcagtaactgaaatgaaaatcatttttaaaaaaacaaacctatatcttattatctgcctttatctgtttagcaagtctaaatgtattaacatttatagtgtaaatattatgctattaacctatcgataataaaacattgcagtctttaaaataactttttattgaagtataataacagataaaagaaaatttgcaaatattaatgtagaacttaatgatttttcaaaaaatggacataacgaagtaaccagcacccagatttaaaaaagaacaaaaaggaacattatctgcatttcagaaaccctcttccccttcactgcccttttccagtaactacactctgaaaagtaatcactttcctgacttttaatgccatagtttagctttgcttgttttggaactttatgtatgtggaatcatacaatacgaactcttttctgtctaactttttttagtcatcattatgtttgtgagattcatccgtatcattgcatttaggcatagtttagttttccattctcccattctattgttgacggttatttgagttgtttctagtttccagaaggccattatgaatagtgctccgtgtgaatcttttgaactttcttgaacttgtcttttagttaacgtacctatgcacttctgtgagtacacatcaaggagtagaattgttgtgttaggatgcacatacattcagctttaatggatactgccaaacagccttccaaggtagcatgagcattaactttgagttgtttttattcaataaagatctttcttgtgatcaagggcaaggttttgttctgttttgttttgttttgttttgttttgttttgtttttaggtcgcagataatgggtcagataagagtccatgaatacgcaacaaaatgaaactcatttggtgattggaatgattgacctgatctctgaagttgcatacaggcagattgaaagctaagaactggacctaaaagcagagtccctttagtgcttttatgagagaagttactatgatggggaaaatccagcaaagtattttcagtcttacaaagagcaatgtagagacggtatgacatttgagttaggatattggactttttagtcaacctttcctagacagccttgttcaagttacttgacctatgtaaatctcattttctttgtttgtgtaatgagactaacaatacctgtctctcaggtttagtgtaagaattagatgagattatgatatcaagtacttaagtactctgcctactatacagtattcaattaataataacattgccctgcagtctgctccatccatctgtatagcccatttagttgcttcttaatttcttcaattatctaggtttctaatcaccttcccctccatcacccagtggttgagatgcttctttggtaaaagcaaaattttaagtgagtgaccttaatggaagcttaattctatttcctttttcagtagtgattcaaatactgctctaaaagtgttttttgcttctcctccacattctttcagaagacataaggaaaatactggtatttcttttagtcttcacagaataactgacagccggtgtttgaagttgactcttcccagatagttcaatttttagagtaccaaatatgttcagctttatatagtaacttggtattttcatgaaatttaaggaaatcgttgacccttcaaattagaatgtatcttctgcttctcttctcttctcaggatgttgaaaaaatgacagtactacattatttgattaaatatcaccaggtataattctctcaaagcagttttcagaagttgttatctgaagagtagattcattatttattacacaatattctccctccttatccccattctcccccacaaaaaactcatcagaatgagcttaatacaagcaagattaagactctgacataggggagctggcaagatggccaaataggaagagctctggtctgcagctcccaatgagaccaatgcagagggtgggtgatttctgcattttcaactgaggtacccggttcatctcactgggactggttagacagtgggtgcagcccatgaaggattaacagaagcagggtggggcatcacctcacctgggaagcacaaggggtcaaggaactccctcccctagctgagggaagctgtaaagtactctgccatgagggacagtgctatccagcccagatactacacttttcccatggtcttcgcaacctacagaccaggagattccctcgggtgcctgcaccaccagggccctgagtttcaagcataaaactgggcagtcgtttgggcagacaccaagctagctgcaggagtttttgtttgtttgttttgttttgttttgttttgtttttaccccagtggtgcctggaatgccagtgagacagaactgttcactcccctggaaagggggctgaagccagggagttgagtggtctgtctcagcagaacctacccccatggcatccaacaagctaagattcactggcttgaaattctcactgccagcacagcattctgaagtcaagctgggatgcttgagcttggtgtggggagaggtgctgccattactgaggcttgagtacgcagttttcccctcacagtgtaaacaaagcctccaggaaattcgaactagttgtggaacccaccgcagtgcagcaaagctgctgtagccatagcacctctctagattcatgctctctgggcagggcatctctgaaagaaaggcagcagccccagtcagaggcttatagataaaactcccatctccctgggacagagcacctgggggaaggggtggctgtgggcgcagcttcagcagacttaaacattccagcctgccagctctgaagagaacagtggatctcccagtacagtgctcgagctctgctaagggacagacagcctcctcaagtggatccctgatacctatgccacctgactgggagacacctctgaagaggggttgacagataactcatacagaagagctctggctggcatctggcaggtgcccctctctgatgaagcttccagaggaaggaacagacagcgatctttgctgttttgaagcctctgctggtgatatacccaggcaaacaggttctgcagtggacctccagcaaactccagcagacctgcaaaaagggccctgactattagaaggaaaactagcaaacagaaagcaatagtatcaacatcaacaaaaaggacacccatgcaaaaatcccatctgaaggtcaccaacatcaaagaccaaagatagataaatccatgaagatgaggaaaagccagcgcaaaaaggctgaaaattccaaaaaccagaatgcctcttctccaaaggatcacagctccttgccagcaagagaatagaactggatggagaatgagtttgtcgaattgacataagtaggcttcagaagattggtaataacaaactcctctgagctaaagacacagtgcaagggagccaaaaaccttgataaaaggttacagaaactgctaactagaataactagtttagagaagaacataaatgacctgatggagctgaaaaacacagcacgagaacttcgtgaagcatacacaagtatcaatagccaaattgatcaagtggaagaaaggatatcagcgattgaagatcaacttaatgaaataaaacaggaagacaagattagagaacaaagaatgaaaaggaagaaacaaagcctccaagaaatatgggactgggaaaagaccaaacctacgtttgactggtgtacctgaaagtgatggggagaatggaaccaagttggaaaacacacttcaggatattatccaggagaacttctccaacctagcaagacaggccaatattcaaattcaggaaatacagagaacaccacagagatactattcctttgtggaaccccacaaagaacaaccacaagacagataatcatcagattcaccaatgttgaaatgaaggaaaaaatgttaagggaagccagagagaaaggtcgggttactcacaaagggaagcccatcagactaacagtggatctctctgcagaaaccctgcaagctagaagagagtgggggccaatttttaacattcttaaagaaaataattttcaaccagaatttcatatccagccaaactaagcttcataagtgaaggagaaataaaatcctttacagacaagcaaatgctgagggattttgtcaccaccaggcctgccttacaagagctcttgaaggaagcactaaatatggaaagaccagtaccagccactgcaaaaacaaaacaaattgtaaagaccatcaacactatgaagatactgcatcaactaatggacaaaataaccagctagcatcatatgacagtatcaaattcacacataacaaaattaaccttaaatgtaaataggctaaataccccaattaaaagacagactggcaaattggataaagagtcaagacccattggtgtgctgtggagcagggggcggtgctcatcggggaggctcaggctgcgcaggagcccacggtggcggggaggctcaggcatggcgggctgcaggtcccaagccctgccccacagggaggcagctaaagcccggcgagaagtcgagcacagcagctgctggcccaaacacagcttagcagtgctaagcccctcactgtctggggccggcagggccagctggccgctgtgagtgcggggcctgccgagcccacgcccacccggaactcacgctggcccgcaagtgccatgtacagccccggttcccacctgcgcctctccctccacacctccctgcaagctgagggagccagctccagccttggccagcccaggaaggggctcccacagtgcagcggtgggctgaagggctcctcaagtgccgccaaagtgggagcccaggcagaggaggcactgagagtgagtgagggctgccggcacgctgtcacctctcagagggagaggcgtgggtgggaaccgaggctgcgcacagtgcttgcgggccagaacgagttccaggtgggcgcgggcttggcggaccccgcactcggagcggctggcctgcgctgctggccctgggcagtgaggtgcttcgcacccgggccagcagctgtggagggtgcaccagtcccccagcactgctggcccacccgcaccacgctcgaattctcgccaggccttagctgcctccccatagggcagggttcgggacctgcagcctgccgtgcccgagtgccccctggcactcctgccctccacgggctcccgcacgcccgagcctccctgactggcactgccccctactccgggggcctggtcacaccaaccgcccaagggctgaggagtgtgggcacatggcatgggactggtgggtacctccacccatggccctggcacaggatccactaggcgaagccagctgagcttctgagtcgggtgggaacttggagaacttttatgtttagctagaggattgtaaatgcaccagtcagcactgtgtctagctcaaggtttgtaaacacaccaatcagtgctctgtgtctagataatctagtggggacttggagaacttttgtgtctagctaaaggattgtatatgcaccagtcagcactttgtgtctagctcaaggtttgtaaacacgccagtcagcaccctgtcaaaacggaccaatcggctctctgtaaaatggaccaatcagctgtctgtaaaacggaccaatcagctctctgtaaaacagaccaatcagcaggatgtgggtggggccagataagagaataaaagcaggctgcccgagcagtcaccttccggactgtggaagctttgttcttttgctctttgcagtaaattttgttgctgctcagtctttgggtccgcactgcctttatgagctgtaagactcactgcgaaggtctgcagcttcactcctgaagctagtgagaccacgaacccactgggagggacgaacaactccagacgcgccacctttaagaactgtaacactcaccgcgaaggtctgcagcttcacttctgaagccagcgagaccacgaacccaccataaggaagaaactccagacacatctgaacatctgaaggagcaaactgtggacacaccatctttaagaactgtaacactcactgtgagagtctgcggcttcattcttgaagtcagcgagaccaagaacccaccaattccggacacagtggttttcccctgcagtcaggctgcccagcagtagctactttctctaagaagttttccctgatcacccgttcttaaatggatatatccttttcctttctctcttagcaccccgtggttggtgtttatttattgacttacttacttactcctccaacctccccagccaaactttgcgtcattccatcagtcagtggcctgctggtgtctgccagtgcttgctggtgtgctcttctgctggtgtgtgttcctcccaacgtccagccgcttgtgtctgtgcccccagggtcttggggattttatagacacaagatgggggcatggcggaccagggtggtcttgggaaatgcaatatttggggacgaaaacagaaatgcctctcctgatttaggtccaatggcacaggcccagaggtggagccctcaccaggagccccacccttctgctcccagcacttccttgcccccatactatatcattaagacatacattgaagtgctatgtatctcacttctagaagtaaaacaatgtcaatgagattagaagctttatatatacctcttcctgactacatcttctttggtcttcctcaggagaaccattatgaagaatttagtgttaatcattcccatgcatgtctgttttttttactacatatgtatgtatctctggacaatttataattgagaatatttgaaaaatattattgcagtctgatatggttttgatatttgtcccttccagatctcatgttgaagtgtaatctccattgctggaggtgaggccttgtgggaggtattggatgatgggggcagatctttcatgaatggtttagcaccatccccttggcaatgagtgagttcttattctgagttcatgggagatatggttgtttagaagactgtggcacctttccctcaaaccctgctctcgtttactctctcactgtatgatgtgctggctcgcccttgtccttccactgtgatagtaagcttcctgaggccctcaccagcagcagatgctggcactatgctttgtgtacagcctgaagaactgtaagccaaaataaaacctcttttgtttataaattacccagcttcaggtgttcctttatagcaaagcatgaaccagactaacacacactcactagtttatcaagtctacctccaaaataggtcttgaacctttattctttctccaagtcagcattatctcctattcagtaacttcctatctgttcttcccacttgtcttcctgtcatttttttcccattattctccatagcatccagagaggattttgtaaaacacataaccgattacactcctctactgaaaacccttctgtggtttcccactaaataaaactcacattgtttcatttggcctgcagttattcccttccttcctccccagtggtatccaaaggtcagcctttttcctgctctttgtagtggaacactggtcttcttttagtttctggaacattgaaaacatttgtatattttttaggacagcagggatgttaatttaaaaaaaaaaagaaaaacattttttcctctttgtgcttggaatgaactactcactctaccttgctagctacttcctctaagaaattttccctgatcacccattcttaaatggatacatccttttcctttctctcttagcaccctgtggttggtgttttatttattgacttactttgtattgcttttaaaatgcctatttcccccaccagattataaatttctgaaaggaagagctatgtcttttttgtgtgcagctgaatacctagtatctaactttacatatggtagacatactcaaagtatctgttgaaggaaaataggaatgaagaagtaacggacataattatttttatcatcttcatttaaattctacaggctgaaaaataactttgctcttgagttttaagaggaaaaaataagttgttttagtttagatattttaagaaacagaaacctagacatagtagctccagtacagtgggggtttattgtaaagatagaggaaatccaggagaagttgagcaagtagacttcaggaaggacaggcaccaaagttaacctagacactcgtctgtattattctctatcaatctctatgaatcagattttctcccctctttcctgacctacctctttgtagctttgttttttttacagggcctaaaagatctctaagtatttctagtgtgtgtgtaatttaagactaaaattcttaatgttgactgcattgaaagtagacatttgataaatgtaatattaagtaaaattctgatgcatctcaagacaagctatatattagcttggcataggaatttaattagagtggagcatagcatagttttaatatagggcgtaatctttaaaattataatttggtcctcagggttgaagtggtagctggatccaaatcattttcatagtatacatttgcaggtgaggttataagtaaaagcagtgtgcaattttgacccatataaataattttaatgattattggcaaaagtatatgaaatatttgaatgcttcccattgtctagaaactgtattgggaaagcatcttctaagtaataagtgttgaaagacctccattgtaattattagtaacaacattctttcaatttataaattatctatattgtacaaaagagaaggaactcatgcagtatcagtggaagtggattaaaaatgagacctttcattgaagagtagttatttccctttaccaccttgtttcataaatatccaattttagctgataaactttcagacttactgtttaagtctcaaatatttgaggacagaatactggcaggctttactggagagtatttctgggccacacactgtactaaaagatttacataccttgtcacactattcttaccttctccaaacagactgcagcccttcacacccctcatacagttgcccaatttagaaataggtttttcaacttttttcaattcacatgggcagacgctgtgattatccttgtccttcatgtcccttagtaaataacagatggtctttgtctcttttaagaaatcctcattacctactctcattttaagacagaaatagtaatcaattcccaatatcattttgggtctttcagtccaagacttgactctgttgatctcatatcccaggtcctcctatggtctggcaagacttctccatgttaaattccttcacctgatgctcctggtattcttttccagctgcacttttcaggcacagttttccattggtatccacagggtttaaagttcccctcatcccccacagataccaaaatctgaggatgctcaagttccctgtataaaatggcataatatttgcatataacctaacacatccttccatatgctttacatcatctctagataacttataatacataatacattgtaaatggtatgtgaatagttgttatttgtttttaagtttacgttatttttattgttattatttttattttaaagatttttccatctgcagttttccatctgttgtttgaatccacatatgcagaatccaccgatagggagggcaactgaacttaattatctgcatccattgtttggcatttagtagtagtagtatttttagagacagggtcttgttgtgttgccgagagtagagtgcagtggctattcacagacattatcatcatagtggcgcactacagccttgaaatcctgggctcaggtgagcctcctacctcagtctcccaagtagctgggactgcaggtatgcgccactgtacccagctgtttggcatttttaaccaaagagtagtttaacctttttcttatttatccagggcttcttaaccatatctaaacatacaatatttagctaccagtactagaactgttgtttgcatttgttaaaaaagaggcataataggaccttctggtctcctactttttgggttgtctcaccgggactttcagaggctcttattttttatttttttctttcgatacctttggtatgaaagctgttattttttagaagtccacttgacattttgcttcttgtcctcatcctagtagtatagcccattttgctcttcttaggaatatgccagaaaatttttcataattgaataaaacaatttcctgctggtcctctggctcattgacctattggatttcagcttggaccacatcatgtctggtaattatttcttaaggcacttaaagcacctggtagtttgtttacttacttacttcgtgtagttgttctcctaacatcccaatgaagtaggtacaccctactttgtagactctaaagattcttggttatgctcattggcaggcaagaatccattttatccataagaatccttaatacagagaagaattagtgcattcttagtgtttatcatctctgttaccttgcaaatatacataaaagatccctcgttaatattaacatatgaattttaggccaggtgcagtggctcaggcctgtaattccagcattttgggaggctgaggtgggatgatcatttgaaatcaggaggctgagaccagcctgatcaacgtggcgagaccctgtgtctatcaaaagttaaaaaatttaggtaggcatgctgggcacaactgtactcccagttactcaggaggctgaggcagaggatcgcttgagcccaggagtttgaggctacagtgagctatgatagcgccactgtactccagcctgggcaacagaacgagattcctgtctcaaaaacaaacaaatgtatgactgtaaaagaatgaaagataaatatccaatagtactgattaaacctctcgtttaagtgcccttttttgttcccgttaaatagaatcaaagcacattttatctaataatgtataagctttcagcctgaaaaacagcttaaaataagtgactaaggttgaagctaatatgagtcaaccttaaaacatgcaaaatttttacaaaaaacaggtcacctttagatgccaggtattactttgcctattcaccaatctagatgtattatctaattcttgtcttagaccttacatttttttccaaaatcagtatagttgctttctgtttgtctggtggtgaaccgcatgataactttacaagtactgctggttctatgagagtctttttcttactatcagaagagcatggtaacagtccaatactaaaagaaaaaggaagtacgttagttgattataccagtgaatcttgaagaacatatcaagtaattcttttctccaaacttcaaactgttatagttcacacggaactaatcttgggtagggaggcagatggggtgggcttcctctgtctgctgcttcctgtcccagttgctcctcaacagtaacacctgagtcttcttagccacctttctcagtacctcaggaaacctctgtgaagctttctttctccttacttattcctccagactctgttgtcttcttctttcattcttctgttgtcttcttattttattcttttgccctgtggtcttccttccttttaggtttttggtttgagttttggttattcaatctcacctaatttcacctgggaaaatttttgagatccaatcaggttgaagaagaaagggaaagaaaaccacttagcactagtccctcaggatctaccgtatataagccaaacagacattctcctctgccagaatgctcatctgttggcataactttgttcctaagaatctctacctcacttctctgcttagagttgtattataaaagacccccttctattatcctgggtcaataagtgcacaagctcaaaaggaaaagaagggatgtgctgtgccccaagaaaggatgatagaggaagaaaaatcctgtcctggctcgtctgatgtctcagttggatattacccaattcttaatgtttaataagcccatttatttttgaggcccttggcatcatttgtcatcgtgtactattttaatggcaataaaacgttcctccagctgtatcaggctgagtgtaaggatggtggagacccaaagcagtttacatgaaaccctccatgggaaggagaggagagaaattcaggatgaaactacagccacagccagaatggtggactgaagtaccagtgttccctcagatgggggaactcctttatagtgtggtaggttttcttttcttttcctttttttttttttttttttgagacagagtttcgctcttgttgcccaggctggagtgcaatggtgccatctcggctcaccacaacctctgcttcccagcttcaagctattctccttcctcagcctcccgagtagctgggattacaggcatgtgctactatgcctggatatttctgtatttttagtagagatggggtttctccatgttggtcaggctggtctcaaacttctaacctcaggttatcctcccgcctcagcttcccaaagtgctgggattacaggcgtgagccaccgcacccggcctatagtatggtaggttttctgaggccttctttataccagtattaaaaatgaatttttaaaattgtgccagaattaagattttttatctatttttctccaagaattattagccactttaaaagatatctttaataattaaagataaaattggattttatttgaaaagtactgataaacctgaattacatgttacgtaatatattaactgtcttcctatcttcaaccttcaaatctataatagactcgatatcaaatagtactttgaacccagtagagtttcacaacctttcaagtgtagaaccaatcagtcaacaagcatctattaaatctctctaagttcaagaaaagatcctttaatttaatctagcatttggataaaacccttgaaaaaattggttgttggttacactttttctacttttccttaatggggctacttaaagatttatttaggtcagatatggccaactcaaatgcacaaaaatgagtgaaatgtgctaggtataagacaagatggagtattgaggactgggatgaactgcagagtacatattcacgtaaaggaactcaaattcaatttttataaaaagctgaggccaaatagagtgtatcatcagtccaaattcagccaaaggctgcagtttgtgacctctgatttagatagcaagatgaaatattatttggttgggatttttggaggtggtaggagtgactccaaatcataataaattaatatatatgtactttagaagcccatattgcaagacttgtatttatgatggctataatatatattgataaaagagtaagtataattatgcctagaagcataagacagtatttctcaaagtgtagttcatagcaactttcactagaataatttgggaggggtgggagagggactatttcaaaacttactacaaagctatagtaatcaaaactgcatggtaatggcataggtgtaaatctatagattaacagaatggaaatacactcacgtatttgtgggcatttgattttcaacaaggatgccaagacaatttagtaaggaatgaatggccttttcaacaaatgttgctgaggtaactggagatagctagctagctagatgtagatagatagatagatagatagatagatagatagatagatagacagacagatagttggtttttttttttttgagacagggtctggctctgttgcccaggctggagtgcagtggcacgatctcagctcactgcaacctctgcctacctctgcctccagagctcaagcactcctcccacctcagcttcctgagtggctgggactacaggtgcatgccactatgggcctggctaattttttaattttttgtagagacagggttttgccatgttgcccaggctggtctcaaactcctgagctcaagtaatccgcccacctcagcctcccagagtactaggattacaggcttgagccaccggtcccggctggtaactggatattgacttataaaagaatgaagttgcacccctacttcacacccctctctccatataaaagaatgaagttgtacccctacctctatggcaaatccatagagatagaaagtagattagtttcctagagttgaagagaggagggattgacgagtgagtgcttacaggaaaaagttttcttttggagatgatgcaatgttcaggaattaggtagtgatgatggttgtacagccttgcaaatatactaaaaaccaactgaactgtacatttttgaagaacaaattttatggtgtttgaattacatctcaatgtaacaaaataacttgaagcaggagagattgctcattaaagataaaaattctagaggtcatcttagactcaagcttctttgagaatatggctctagaaatctacaagtttaacaaatatactcaggtttatttcctaatgactaggaaatactgatttaacagttgtgtatacttgtacattgaaatgtgtttaggctaaaggacatgtgctttttgatcattttaatcatcagcagcaaagagttatgtggtattactttctgtcccatatgagagttatcagatgataaaggtgtgatgctttctctggaggaacaagaagacggccatacatagaagcatgaaatggtgtactttttcatttctttgaatttgttactttggcaaattctgggaagaaagataataattcaacgtaatgaattcagagaagcacaaaacttaagggaaatatccagcaatatttctgtggttgctttgtttttagtgtttattttggggatgaaaaccttggtgtgttgatttttctcaaggctttcttggtcatgtgttactgtgggcctttcaacaaagccaagttgacagagaacagatgcatattttaataactaaacttcctcagcaatagtatctggatcagattggtttcacagcagtgttgcagcaggataaattataattaaaaataggcaggtattttatttcatgaagatttaggggaagaacaagatggaactttttagagttagcagttaccaaataggggaatgaaggtagatctgcaatttcccagtacaaagtatttgggggcttattcagagttttacttgcactgagttgataaatggtatatgatcatcagtagtatcctataaatattaaactgtaagtctcttttgaaaatctaaaattactcctttttctaaattatcaaaggttttaaaacatcaaattcacaaataccttttttatttaaagagaaagtaggatttgatactcaatttttttgttgttgttgagacggagtcttgctctgtgtccaggctggagtgcaatggcgccatctcagcccactgcaccctctgaatccctggttcaagcgattcttctgccacagcctccctagtagttgggattacaggcatgcgccaccatgcccagctaatttttgtatttttagtagagatggggtttcaccatgttggccaggatggtccccatctcctgaccttatgatccacccgccccacccacaaagtgctgtgattataggtgtgagccaccgcgcctggccgatactcaatttttttatggttgatgccagtcacacttactttggctaatcctgtttctttaacgataaaaatagatgatgaagcttaaaagattctacacttacacgaatggtatattatattgttttgttatatgtaagatgtacgaaaagtactttgtttaattagggtctcggaacatgaatatgactagcttttcccatttttccttttttatcgcaagcttctttttttttttgagacggagtttcactcttgttgcccaggctggagtgcagtggtgcaatctcggctcactgcaacctctgtctcctgggttcaagcgattcccctgcctcagcctcccaagtggctgggattacaggcgcccaccaccacgtctggctaattttttatatttttagtagagatggggtttcatcatgttgtccaggctggtcgtgagctcctgacctcaggtgatctacctgcctcagcctcccaaagtactgggattacaggtgtgagccactgcacctggcctttatctcaagcttctaccagtagtgataaatggctagcaagaatcttctatgccttagcctgaaggagatgggttccattaccaatcttctttcttccaaaatatagaacttcaggtatttgcccgaggctgcaccctcagccaatattttggctctattttggcctcagccaatatgttgtgctctatattaggcaagtcacagtacatgatggagacacagaactgatgaacattttcaaaaggaggcatgctggagtgattcaatacaaataagatagacagactcttgcattatgttgacccataggaatttgctgggtttttttgtttgtttttgagaaggagttttcgctcttgttgcccaggctggagtgcaatggtgcaatctcagcccactgcaatctccacctcctgggttccagtgattctcctgcctcagcctcccaagtagctgggattacaggtgtccaccaccacgcctggctcatttttgtatttttagtagaaacagggtttcaccatgttggccaggctggtctcgaactcctgacttcaggtgatccacccacctcagcctcccaaagtgctgggattacaggcatgagccactgtgcccgtccaaaatttttgtaagtcaaaattttttgaatattggcagtttcctgtggtgcatcctaatattatactgagagtagtgatatgttggagataaggtcgtaagaacaggtaatacctaatctaaactgggagaataactactgttcaatcccactattgggccatagtagtcactgtttatataataaatgagtgaagtcttctgtgatgtcttttcgacacatgtattcagtgtgtattatgtatctagtagtctcccaatctcaaagcttctttgaagttgcatatcatatatttaaaatacatgtaaaatttgcagtttgctgcacaatagagccatagttgtcttagtacaaatatttttttcacatgtttaagtaaaacttgtccaaagagatatagcatatttgccttgtttttcccttttcttacacacagctctttgtacctcaggggtttgtcataccataatttgggatgcattgttatataaataggaggccactgaaagtttaaatcaaggtaatgccatggtgaaattgatgtttgagaaaagtaattctgagagagtcaaaatagttgtgttgtgatagcaactggcatatgtgcattaaaaattgaacattaagaataaatgctgacattgtggattatttgttgctttcataagtttgtcctctagcacttgtgctttttatcttttgtattaagtatgcattttaagagtaaatggtataccaccaaattgtctaacagtgctacatttttgtggaatcttgggggagggatcatatatagttaaaattttatattagattttcttttatagccatttacatgatgtggctttttatatttggaggacaaaagaattcatagaatacattaatgtgttacatgatgtcagcagataactagatttctaaaggttaagttattaaaggcttatatggaaatctaaaaagactcatgagtaattacttttaaaggcattgaaaggagtgaaaaagtgggtgactatctaattccagacatgaatatgagacagactagtacttatagcagtttggaggatgccagagaagccaaaaagggagcagcatatgcttccaaattgttttgaagtgaggctttgtcttttctctagaaaaatagataatatctcatcaacttaacatctagaggaccagagatattcactgaaaggaatgctttttattcattcaattattcattcatttattaaatattgaacactttaatgtgctgacactgaaatagtcctaacataacatatggttaatagaacagacgttgtctttgcatctatagtgctaatacactaatgggcagataataaatacaaaaaatatatatgactatatattataataaatgttatgaagggaaactacaagttacttcaagatttggtaacaaggaaatctattttagattagggtttcaagaatggtctctctgagtaagtgacatttaaagctgagatctaagagacgagtaggagaaatcacggtgatgagtaggggaagtgcatgcttgaggctcttgggtggcaggttctaaaagaaagccagactttctagaacacaagagcagttggccaagaggtaggtaggacccaaattataccagagcttggtggccatattgaggaggacatgggatttcattctaactgcaggaaaaagccattgaagatctttaagcatggaattggatggagtgacttaagtgtttcagagatgactatggctgttgtgaatgcattgaaggggataaggagaccagggaaaccagttaggagctactgctcgggtaagagttgatggtggttagttgaatgtatcagcaatgaacttgcaattgaaggtcaaagctaactttaaattaaactcttaagaatattattggtggtgtgtctcccaagaaaaatacctgtctaagaaaataggaaacatcatccccaaaagactaaatacgtagtgtgaaggttgagaaagaggaatatattgcagggaaacttttggtgaggtttatttgttgttgttgtttacttccaaaatatggtttccatttttctcccccataagttttctatttgggaaaagagatttagtggaattataaactgaaagaattcatgtataacttttgcctcactttactttttattttcatttttaatctttcatttttttccttctataactttcttgtctttgaaaaaaagagtgcaggtgccttatgtgtccaagaatgaaatagcctctgaagtactatctgtttgcttgctagcttgctggcttgctgggtcaaagaaaaggaagggctcgtttatactgtaacagtgtttttatttagcatgcctctgaggtttttattgtgttctgggacagtgtttatgacattggaagttaaagaaaagaattgcaatgagttggggggatgggggagggatagcactgggagatatacctaatgctaaatgacgagttaatgggtgcaacacaccaacatggcacatgtatacatatgtaacaaacctgcacattgtgcgcatgtaccctgaaacttaaagtataataataataaaattaaaaataaatatatttaaaacaaacaaacaaaagaattgcagtgagtttgagtgacacaaaaataaaattcccatgataattcaataccatgaattatctttattgagtgaaataaattctgagggtatagtaattattttatggtccttttgtattagatttgtgtttgcttaataatttagcactttgaattttctctttgaatttttattcttccagaaatctttgcggggttggagttttcatattgtgacttttgggctaacatctctctagctcttcttattagttaattttcagcagattttttttttctatattgcccagtccagtctcaaagtcctgggtttatgcaatcctctctccacagcctcccaagtgactcactgggattacaggtgtatgccaccatgcccagccttggaagactttttataaattagggtacatcttttttttttatttttcacataattttgtttttgttatcagcaaggttgaatcaaaagtaacttcctttcctggtggtctaattgctaggataaagagagggaaaaaaataacttcatcattactgaattatcaaaatgaggtcttttaatttatctattactattataaggctagttagaaaatttaagtcattttctaagagatagaaattttgttagcttgatttttctgactttttgtcattccttctcttatgtatggtgccatctgctgtttgtgggaagtattttatattttgaagcactacacataatagaaatacagtgtctaaaagaaaaatgtcaaaatacatgaaatgaaaaaagcagtagtgtggcccgtttgaaactttgtggcctgtggcttgtttctttttatgtaaaaattatttttatatctgattatttttagtacttacatgaatcacaagattttggtactcatcgtgttctgtcttaattttgtttttgctcagaatagaagtaatcggtaaacatttgttagttgactcatttggtttgttttttgtgactcctcaggcacctttcttgtaagcttctgcttacagtctatgcaaccttaggcaaataatttcagcccttagcacctctgtttccttctccataagaagaagataataatatcaatttcttaaggtttttctgaggattaaatgagataacacttgtcatatgcatagcacaatcctttcctttcgctaaaatgttgtttccaggttcagtgagtttcccttttaccttatttcaaagacacctttgttaagaatcagatttcattgctataggatcataaactctttgagccagaaggaacttcagtaagtgggcctcaaaatgttagcatgcatttgaatcatatggtgatcctatttaaatgctgattcggattttattggtggttataggatatggaacctcatagtctgcacatctaacttttacttaagcattgctgatactgcccccacagaatgccttttctgtagcaaagctttggaaaacaacaaacagaaaaacaactagtaaagatggagatggatgggaagaggatgactgaaaggtataaaattacaattagaaagaaagaacaagttctggtattctattgcatggtagggtgactatagtcaacaataagttattgtatatcttaaaatgacaagaataaaaggttctgtgtcttcacaccacaaaaaaatgacaaatgtttcaggtgatggatatgctgattagcctgattttaacattacacaatgtatatgttttgaaacatcacattgtaagcaataatatgcacaattattatgtgttacttaaaataaatttttttaaaaaacaaaagaaaaataatccaccaaaatctgattttcttttttgggtaatctcatgtgccagtcatcagaactgtatttctttgtagaagaggaaaggaatccagagtctgtctccagaagacattccagactaatttcttattctttactctcagcactaaattttattagtcagcagttacattttgtcatttctaccaatgttatacagcagtaacattgctgagagaaattattaaagagaattatattcaaaacccagttatttattgtccaagcattatgacctacaaatatttaattggtatccatttaaaattcaactacaacttttatttctatttgtaacttgttgccttgttctttactctttaaattgctttaaatttttacagcattaaaaaatgaaaagctaaacaaattagcaacttcagtaacgtttcaggttacaaaatcaatgtacaataatcagtaacatttgtatacaccagtaatgttcaagctcggagccaaataaagaatgcagtcccctttacaatagccacacacacaaaatgcctaggaatacatctaaccaaggaagtgaaagatctctacaaggagaaccacaaaatgctgctaaaagaaatcacagatgacacaaacaaatgaaaaaacatttcttgttcatggattggaagaatcggtatcattaatatggccatactgtgcaaagtaacctacagatacaatgctattcctatcaaactaccagtgtctttttttttttttttttttttgagatggagtctcactgtgttgcccaggctggagtgcggtggtgtgatctcagcttactgcaccctcccaggctggagtgcagtggtacgatctcggctcactgcaacctctgcctcccaggttcaagagattctcctgactcagcttcctgagtagctgggactacaggcgcaagccaccatgcccagttgattttttatttttagtagagacagggtttcaccacattggccaggttggtctcgagctcctgacctcaggtgatccaccctcctcagcctcccaaaatactgggattacaggagtgagccaccgtgcctggccaccagtgtcatttttgacagaactaaataaaactattcaaaaaattcgtatggacccaaaagagcccaaatagccaaagcaatccaaagcaaaaagaacaaagctggaggcgtcacattacctgtcttcaaatatactgtaaggctatatagtaatcaaaacaacgtggtactggtacaaaaatagacacatagaccaaaggaacagaatagagaacccagaaataaagatgcacacttacaactatctgatctttgacaaagtcgacaaaattcagcaatggagaaaggactccctattcaataaatgatgctgggatagttggcgagccatatgcaaaagaatgaaactggacccctacctgtcaccatatacaaaaattaactcaagaaggattaaagatttaaatgtgacatcacaaactataagaatcctagaagaaaatctaggaaacaccattctggacatcagccttgggaaagaatttatgactaagtcctcaaaagcaattgcaacaaaaacaaaaaattgacaagtggaacctaattaaagagcctctgcacagcaaaagaaattatcaacagagcagacaacctacagaatgggagatgatatttgcaaagcatgcatctgacaaaagtctaatacatagaatctataaggaacttaaacagttgaacaagcaaaaaacaaataaccccatttaaaaaatggacaaaggacacgaacagacacttctcaaaagaagacatacaagcagccaaaagacatgaaaaaatgctccatatcactaatcatcagagaaattcaaatcaaaaccacaatgagaccatctcacacccatcaacatggctattattaaaaagtaaaaataaataacagatgctggtgatgctgtggagaaaaggaaacacttatacactgttggtgggaatgtaaattcagttcagccactatggaaagagcttggcgatttctcaaagaacttaaaacagaactaccatttgacccagcaatcccattactggatgtatatttaaaagaaaacaaataaaaagacatacacttacatgttaattgcagcactatttgcaaaaacatggaatcaatccaggtgcctatcagtggtgaattggataaagaaaatatggtacacatataccacaggatactttgcagccacaaaaaagaacaaaatcatgtcgcttaaagcaacatggatgcagctggaggccattatcctaagtgaattaatacgagaacagaaagcccaatgcctcatatttgcacttgtaagtgggtgctaaacattgactactcagggacataaagatagcaacaatagacactggaacaactctagactaatagaggaggggaggaaaagggtgggaacaagggttgacaagctaactgttggatactatgctcagtacctgggtgatgggatcattcataccccaaacttcagcattatgcaatatagccatgtaaccgacctgcatatgtatcccctgaatctaaaataaaagtcggaaaaaaccccaaacaaattagccccaataactctctgtaaattctagagtaattacttgactccaataagacctttttttggtgagttggatatacaatgctattctcttgatgtttggattttccccgaaactggttaattatgtttaaaactgaatacccttaagtccagtgccccagtgtgggttcaacaggataaagtgtctatccacagtattctctgagaaggaatcctttagttttagccagagagtcatagagttgttcacacctgaggaatcatccagcttagttacacaagttcaaggtcctaaaggaaattaaaagaggcataaaatgacttctcagaaatgtatagattgactaaaaagtaaaaattgtggcctagaaaaaaaacttaatgagtagaaagttttttccaaatgaaatcttatgtataaggacaatactaccctttcttcctacctcccctgaagtgatggtaaggagtatcttgctattttatttttattttttgaaagagcatctcgctctgttgcccaggctggagtacagtggtgtgatctctgctcactgcaacctctgcctcctgggttcaagctattctcctgcctcagcttccccagtagctggtattacaggtacacaccagcatgcccacctgttttgtatttttattagagaaggggtttcaccatgttggccaggctggtctcgaactctgacctcaagagatctacccgcctcggcctcccaaagtgctgggaatacaagcgtgagccaccgcacccagccagtatcttgattttatctggtgtagcccagtgcattcacaagcattgctgtaagactacacaaatgtcatgaaagctactaggatttgtatggacaggttgcactatcatcctgtctggatacttgtcatgtttaagatttctagaaaaggaacttacccagtgtactttgataactttttcttgatttttaattcttttgcttttacatctgtgaaaaatagatcattataatacttttgaggtattttttttctagtggataatctgaatgcaaaatcaaccaacaaaagaaacaaacaaaaaaaccctgttataccctggaactccaacttgagaattttcttttccttgccattcctggcttccatcttcacagtcattcgtagactcaccctctctttaactttgcaagatctctggcaattattccagtcctaaaaggctagattctataggcatattctgtaaatgcttcttggttttcagactgtgtcatggtaatgctgttgccttccttgctacatcttctgagaactagaacttaaggacttccatgtctctgtacacttattcaatctgttcttattttaaaatcagaaaaaacaagggactatgtttctactatattcaaatcataaagaattatgggctgggcgtggtggttcacacctgtaatcccagcactttgggaggccaaggcagatggatcacaaggtcaagagattgagaccatcctggccaacatggtgaaaccctgtgtctattaaaagtacaaaaaattagctgggtgttgtggcgcgtgcctgtagtcccagcttgggaggctgaggcaggagaatcacttggacctggaaggtggaggttgcagtgagccgagattgcgccactgcattccagcctggcgacagagtgagaccccatcccccccaaaaaaaaaaaacatggattgttagacttgaaagtaactctacaggtagtttaagccaataccccttatttaaaagaagagaacttaagtatgacagtaaaagttgtaagaaccatgactgatctcaagcttaaagccggagcagatagtttagcttagcattagggcttaaagttaatactctaagtagattaggtaattctttaatagtagactgtggtatttggacctatgctacagaattctgtctagttttattttttagatgatttataagagtcttgaagatagtttataggtgaacaaacgaatttaaaattagtacgcatgagaacacatcaaaggaattaagaatatttccttaaaaaggataccttcaaaggcatcttcagtaacatgaaaaattcaaccaagtgttctctactctatttttttttaggatagtacaaaggaagtaaaggcataatatagtaaaaagaacagcagcagttaggtgtgaggcaaatccacacaatgaagctggtgaacactagaacaggagggatatttgccttcctggttattttcctcaaattctctgcttattatcaatatctgtttactgtggttgggatttagcatccaaaggcacgaatggatgcacttcccaagactctgtcctgtttagtgatatttcatggtctatttaataaactgtttgggggactttaacatgataattgtcagggcatatagtgcttaactgtgtgtcagacacttttctaagtgtttttttatatagtaactcatttaattctgaaaaaaaaaccctctgaggtatctataaggaaatcgaggtagagagagttaaaataactctaagtcatatagttaggaggagatgcaaagttgattcagacctaggaaggctggctccgagtctgtctcataaccaccatgctttattgcctctccaaaaaagaataaaaggaggaagcggtcagacttcaagggaaataaaatttcttttattttacctagatatctctagatccgataacagctgggaccaagatatggcaggctgcaggggtcaaggagagccagcaagcagtgaaacatctgcctccctctccagcttcatccctcacatgcactttcgtggtcccatccctcccagatcacaggcagttctgcctgcttcgtttctctctgcctttacagatgctatgcttttggtttgcactgctttcctcccaatactttaacttgaccaatttgtatttatttctctacctctttcaggcaaaactgctttgtaagcatctactgcattgtgaaacatttccaagtttacccaagaagtactgatctttctacctttgggctccccctgtcccctaaatatccctcctttttttgtactttcatcactcatttgacaactatttatttagcattactatgtgccaagcactattctggacactgaggaaatcagtcagtccaaatttctgacctaataaaacataatatctaagtggggaagaaaagcaagatttggaagagaaatgataggatttgatgtctcccttaaagggatcactccggctactgtcactctagagaaaaggagtcactctggagaataggctgtggggggtcaagagcaggagtgaggagaccaggaaactgttgtgttaatccagatcaggaggtgatgatggcttaggtaagggtgggagcagtgggaatggtaggaagtagttgaatttgggatatgtttaccaagtagatccaaaaagatttgctgatggtttaactgttcgttgtgagagaaagaaaggataattctatgattttttgcttatgcaactagaggaatgcacttaccattgaagaagagattggaggaagaacaggtttatggggaaaataaggaattcagatttttacatgtttttgattcctattaggacatccaagtagagatcttaagatagttgaatatatgattctggagttcagaggagatagtgaggctaaaacgttgatttgggagttattagtgtatgctatgtatttaaagccacaagacttgatggggtcacctagaaagctagctgacgaccaggtatgaccatagggaactcgggagatggtagtattcagagcaaaaggtagttcagtaaagctttcaaagccccagccaaagggatagaatttagagtcaggacctcattaaaaaaataaaaataaaaaggaactgaaaagagtgaaatgagatgcctgttctaaacaggcctggagatttgagcaagttctcaggacagcaactagaagaaggtaagaatccagaaccagaactcaattaggagacagaaacttggtcttaggagaaagtcagatgccatttattataaatgaggcacaagatcagagataggatctaatcaaacatatattgatgttcagcaccttgaatgttggattgtagaactctttacttttccactgggaccatgtgccagatcattctttatgccatgagtcaaccagagctggaggcatatcatgggttgaccttcgttcatcatgtccaatagaaatagaattatttaaaatacaaataatttttgcttatttatatgcctaaaattcttgcacctttcctactaattcttcagattgcattgagtcacacttatgcttatttagtcttttttttaagtgggaagtatgctcatttaatttgggaaattaggatctctctcttttttttttttttttttttttttaagatatggggtctcactttgttgcccaggctggagtacagtggcacaatcatagcttactgccgcctcaaattcctgggctccagcaatcctcctgcctcagcctctcaagtagctaggactataggcatgcaccaccacaccaaactaattttaaaaacatgtttgtttgttttttggtagagacagggtcttgccatcttgcccagactggtctcgaaatctgagttcaatcagtccttctgcctcagcctcccaaagtgctgggattacaggcgtgagccaccatgcccagccatcttatttttttataatccttctcattccttaagaaactgaaaggctggaagcttctcccttgaatagaaagcttcccagtttccagtcacctagataatagggtcaactcaattaaattaattcttaaagatgtataaacaggaaatcgtggtctttgcattgctgtaaagaaatacctgagaccggggctgggcgtggtggctcacacctgtaatcccagcacttttggagcccaaggcaggagaatcacttgaacctgggaggcagaggttgcagtgagctgagatcacgccattgcactccggcctgggcaacaagagcaaaactccatctcaaaaaaaaaaaaaaaaaaaaaaaaaaaaagaaatacctgagactggataatttataaagaaaagagttttgattggcttgtgattctacaggctgtacaagcatgactccagcatctgcttctggtgagggccacaggaaagtttcaatcatagtggaaggtgaagaggagcagcatattatatggcaagggaatggggagataccacactcttttaagcaacaagatctcatgtgaaccaccagagccagaattcactcatcaccaaggggatggagctaagcccattcatgagggatacacctccatgatccaaacaccttccaccaggcttcacctccaacattggggattacacttcaacatgagatttggcgaggatgaatatccagcccatgtcattctacccctggcctctcaaaccctcaaatctcatgtccttctcacactgtaaaatccaaccggcccttctcaatagttgcctcaagtcttattccaacattaactcaaaagtcccaagtccaaagcctcatctggagatgagatccttctacctgtaagtctatgaggttaaatacaagttaaccattcccagttacaatggtggtacaggcactgggtaaacattcccattccaaaaggaagaaattggccaaaagaaaagggtaacaggccccatgcagttctgaaacccagcagggcagacattaaaccttaaagctcctaaataatccttgtttccatgtcccacaccctgggcacactggtgcaagtggtaggctcccaaggccttgggcagctctgcccctgtggctttgcagggtacagcccacatgactgctctcactagatggaatgcctgtggcttttccaggctgaggattcaagctgcccatggcgctaccatactgtggtctgaagggaaacagcctctttcctgcagcttcactaggcagtgccctggtggaggactctgtgtgggggctccagccccacatttttcctccacactgccctagtagaggttctctgtgcaggcgctgcccctgtggcagtcttctgcctgggcactgaggctttttcatacatgtcctgaaatctaggggaaatctgccaagcatccttcatgcttgcattctgtgtacctgcagacttaacatgacatggaagctgccaaggcttatggcttgcaccctctggagcagcagcctgaactgtacctgggcactttgagccatgactggagccagaacagctgggatgtgggaagcaatgttctgagactgaccaggacaatggggccccgggcctggcccctgaagccattctttcttcctaggcctctcttcctatgatgggaggggctgtctccaagatctctgaaataccttcaaggccttttgcccattgtcgtggatattagcacttggctcccttttagttatgctactctctttagcaagtagttgctccatagcctgcttgaattcctctcctgtaaatgctttttcatgctctgccacatgattagactgcaaactttccaaacttctttgttctgcttcccttttaaatataggttccagttttaagtcatttccttactcccatatttgattgtaggttgttagaagcagccatactacctctagaacactttgctgcttagaaaatttttccaccagataccctgttatcattaagttcaaacttccacaaatccctaggactcagacacgatgcagccaagttatttggtagggaataacaagggtgacctttgctccagttcctaataaattcctcattttcatctgagacatcctcagcctggccttcactgtccatatttctatcagcattgtggccacaatcacctaacaagtctctaagaagttccaaactttcccacatcttcctttctttctctgagccctccaaactcttccaacctctacctgttacccaattccaaagctgcttcccacatcttcaggtattaatagcaacccctcactccttggtaccaatttttatgttacaccatttttgcacatctgtaaagaaacacctgagactttgtgtaattttcaaagaaaggggtttaatttggcccatgtttctgcaagctgtacaggcatggcaccaacatctgttcaactcctggtgagaacctcaggaagcttacaatcatggcagaaggtgaaggagaaccagcatatcacatggaaagagcgggaccaagagagagatgggggatgtgccacacacttttaaacaaccagatcttgtgtgaactaccagagccagaattcactcatcaccaaggggaaggtgctaaggcattcatgagggaaccacctccatgatccagacacctcccaccaggtccccccttcaatgttggggataacattttgacataagatttggaagggacagaaatccccaccatgtttggtggcatcatgggctgacattaatacatctctttaatgggattggaagttaggagatgtttcaaggaggagattaccttgaactgagctgtcctggtcagttggccatctgagagaaagaaatggggtccctgccacaaggcgcctgggaaattaaatcccagttagagaaataggaagacactcaggaagtaatcagaaagacacttcactggttatttccccccagcagttttgctgcgatgaatttcaggggtagaagcaggaatggtggaataaggaattggaattcaggcctacttgtataaggccctcctcagttgacctataccagtatttctacatttttcttatttgacttctcttaccttgtaaaatatatagaaatcagtggtttctagggtctgcagagtggggtgggtggcactaaaatacagtagatgttaatacccgtcttagacttaatgaatcagaattatccagggtgggatccaggaatctgaacttttaacaaatctcttttgttattcttaactggtactcctcaatttactgtttaggaatcttacacatgggggaggttgagacacttaactaagctagttggtggcagaaatgaaactgtgatatggatcttctaactcctgctctaaagcttttgatttatagtatagtattaatgaacttctattgtgaacttgcagaccgtttaatattaggttcaatatactatgtttaaatgggaatgaatttcacagggcttatagagcctttccccataattgtaaaatttttgcagcaaccgctatattactgttgctacaattttctttgctaattaggtctctttgccttgtagctctcacttttaaattgtttttgttttgtcatttagtagatctcagagcaattaactaaactaattcttccatctttttttaaatggagacatctcctcctcactatggcaggaagatctgtgatttctagtataactgcttgatgtgaggacagggttacttgggaaagaactttcagcatgagtgatttaattatctgcctccattagataggtacctttctcttgcttggctcctaataaaggaacaagcactctcatccattttacggtttaaataaattttacagttaaatatgactagatatacttttagtacccaaagttgtggatattttgttccataaaagctaattactaatagaaaatggtttgctagataaattacttaactgaaaatatactagaagcttatttgtgctttctaaaaaagttgataattatgattcactggttagaagttgtagattttacatatccctgatgtatagatggataagtgcaaataggaaaactatgctcttaaattatcatgattgcttgaaaacttggtaatgctcagttctcagtctggtttcatactagaaactcctggaagttcttaaaaatacaagtgaccacattctactcctgagaaatttctatttatttgacctaagatggatctcctgcctctgtgtgttatgaaagctccccaggtgattttaataagcagccatggttgagagccaatggtctaatggaaagagaactgaattataatcaggaaacttgtcattccagtcttaattctgtgaactcaggtaaatcatctaacatatttaagcttgcattgtaaaatggaggtaattaataatggcctatatgccggattaatatttttacagttgaatgaaactatatactcaaaagtgctttgcagtaaagtgttatacagatggtggcatagcaattaagatttactacgcaatatactactgtgaagtggtatgtttagtcttttgtacttcttggcagaaagatgctagatcccctgtggcagaaagaaacttaggctccttagcgatcctcagggtatattattatgattcttaaagttcactctgtatttttatgtgtaccaggctgctagtgtctctaggtgatagggggaaaaggtagaggaaagggtggagttgctcctgctggtgattttttaaaattgtgagttcctataattagtaacatccttcttacatcttcatagagacatggttggtagcagtggagtcgtttatataactttacaaaccctctcttgtgtactctttttcaatgttattctcttaaatcacttctgtctctgctttccctagtgtttaagcttcactaacatttacctatatataaatggatgaggacagaagagaaagggtccccaaagatgaatacactcattactggtttcccaacatgatataaacctaggacttcaccccttggagggatgaaagtttactatgcatagcatttcctggtgtgtcagtctcggtacagcctcttgctcaattcatcagctgtttccaggcaaaattacataccacttcttgagtgttttaaagcctcctaactgtatatatgtgagttctttgatatattgacttctttttctttgagtcgattcccagtagtggcattgctggatcaaatggtaattatatttttatttttttgagaaatctccatactgttttccatagtggctgtactagtttacattcccaccaacagtgtatatgagttcccttttctccactttcttgtcaacatctgtcttttttaataatagggattctggctgaggtatgctatctcattgtggttttgatttgcatttctctgatgattcatgaggttgaacattttttcatatacctgttggctgtttgtatttatttttttgagaaatggctattcatatactttgcccaagtatgaatgggattatttgtttttttcctgttgagttgagttccttatctgttctatatattagttcctgttggataaataatttgcaaatattttatcccattctgcaggttgtctcttcactctgttgatttttttgttttgtttttttttttttgtgtgtgggagctttttagtttaattaattcccaatcacttatttttggttttgttgcctgatcttttgaggcctttgtaacaaattctttgcctaaaccaacaaccaggagagggttccctagattttttcttctaatatttctatagtatcaggttttacttttaagtctttaatctactttgagttcatttttgtatatggtgagataatggtccagttacattcttctgcatggctatacaattttcccagcaccgtttattgaagagattgtcctttccccagtgtaagtttttgttgtttgtttttgtgtttttttgagacagagtcttgccttgtcacccaggctggagtgcagtggcatgatcactgctcactgtggcctcaacctcatgggcccagatgatccccctgcctcaccctcccaagtagctcagactacaggcatttgctgccacacctgactggtgttttattttttgtagagatggggtctcactctgttgcctaggctggttttgaactcctgggttcaagcaatcctcctgcctcagccttccaaagtgttgggattacaggtgtgagccactgtacccggcccccagtataaattcttgttggctttgttgaagatcagttggctgtaactatgtgtctttatttctgagttctctgttttgttctactggtctatgtggctacttttataccatgttgtggcatttttaaggattttttttttaagtggggagtttgagaccagcctgggcaacatggcaaaagcctatttctacaaaaaaaaaaaaaaaaaaaaaaaaagtagaaaaattagccaggcatggtggcatgcgcctatagacccagctacttgggaggctgaggtgggaggattgcttgagcctggaaggttgaggctgtggtgagccatgatagcactactatgctccagcctgggtgacagagcaagaccctgtctcaaaaaaaaaagaagaagaagaagaggaagaggagggggaggggggaggaggaggaaagaagaagaagaggaggagggggagggggaggaggaagaaagaagaagaggaagaggagagggagggggaggaggaggaaagaagaagaagaggaggagggggagggggaggaggaggaaagaagaagaagaaagaaaagggggccagatgcggtggctcagcttgtaatcccagcactttaggaggccaaggcaggtggatcacttgaggtcaggagttcgagaccagcctaactaatgtggtgaaacccatctctactaaaaatacaaaaattagttgagtgtagtggcgcacacctgtaatcccagctactcgggaggctgaggcaggagatttgcttaagcccaggaggcggaggttgcagtgagctgagatcgcgccactgcactccagcctaagcgacagagcaagacttcatttcaaagaaaaaggaagaaagaaaagtggtatgagcacaagaactctaacaaaagatttctggatggattgggttaatggaaaactggcagaagcctggaggaaggagaaggtcaagatcagctaatagtagctgataagaagtcctgtatcattatgaagagtatcaaaagcacccctgcagcctgggatggttgactgataactataactgtaaaacaatataatccgatgtgtatcatgacttaagagaatttgagaagaacagaaaggtgaatgccagtattcaatggccaatggaacatgtgtttagggactttatagcaatacttcagtgctctaatgttcaggtcatacctccctatcattccctaggtggtgtgttatctgtttatatttttatctgctatcctaatctgggagtcctctgagtgtagggatgacttatccatctttgtaaatgtcctcaaaatgcttgacatatgatgaatatgttaccacaacaccaggggttcagtctaggtcctgctgctcacagcacagaaagccaatgactaagatgatgattattgccaaggaagaaggctttaattgggggctgcagcagacgagatgagatgggagctcagtctcaaatccatctccctgacaaactgaaactagggacttatatagcagggaagagatatagcaatatgtaagaaacaggaactagagaggggtaaggaagcaattatggtgaatgaggggccctcatctcattatctggatatggtgatctggtgagttccagttcttccatacttttttttgagagacctgaaggtcctttgttgagtaaggaatccgataaaacaaatgttaaggttcaagcttcaagaccaaaaacgtcaatttctatgtttatccaaaaaactatctattgaactattgggtcagtttgaaacacatgttaaaacctctaatttgatttccttatctcattttgcctgccttgtttctgaaagttttatctaattcagatgtcacaaacctctaaaaatttctttccttgttcaacaaaccccctatgtcacaagtttacctgcataacaaacctgaacatatacctttgaacctaaaataaaagtttaaaataaatgaataaataaataaataatagcaaaactatgtttttttaaaaaaaattcttctcagagtcacctatgataaagacttctagattttgtagatattttactacttaatctgtacaaacaagtgtaaaccaagaaaatattttaaaattactcatgactaaacagatgcattcatgttaaacttatctctcatccctacccattcttgaactctttctcattcactagtcatttatgaaaaaactgtataacaaataactataataaaatggaaaatatataattaagctagaggaaaggaagggtgggagtcatcctttttttttggtatatgttagtaaattaatagtaaaaataagggaggacttagccataagggttttaaaacagcatgtctcaatttgtatacaaggctactatgttggtctgtgaaatacgtaaaaaaaaaaaaaaaaaaaaaaaaaaagcgattgattttcagtgctgcaatcctgacctctagtggacattcagaacaaaacccaaacatcacattcttttatttagttactccatcaagcaccattagccaacctaaaatattaaactttcaaagagattaaaacatgagaagcagaataaagtaaaagaatttttggctaatattctaaatattcttgctgtagaacctgtatttaagagcagctagtattaacttatttctttttgcgtgttaattatctgtcactttcactactttctttgaaacaatgcattgctttatagatcatagcagcaagaaatttatcagagaagccaaatggattttcttttgattacctgtaatatataacaagctatacgaaaactgagtggctttaaaaggacaatgatttttatagtgagacatatagtgatgttatgtaacctcctgatagaatgcactgagaagggcacagcatcacttctgtggtatttgtgcccaaaatacatattctgaatttaatcataaggaaccagtagacatatcgagttgagggacattttataaaataactggccaatactcttccaaagcatcaaggtcatgaaaaataaacactgaaaacggtcccatatgaaaggagactaaggagacatgacaaccaaattcaatatataatccagaattgcatcctggaccagaaaaagggcattagtggagcatttgataaaaataatagtttcttggttttgatcattatactatggttatgtaagatgttaatgtttgggtaaaactgagtgaaggatatgtaggacttcttggtactgtttttgcaaagtttttctaaatccgaaattatttccaagtgaaaaaaagtaattaaaaccaatcatttattttcttacaatctcatgagtcagaaattttggaattcaactgtgtggttcatctctgatccacttggcatcagctggaccacctgattcacttccagatgacttctttactcacatatctaccactttggtgattcttggtctttcttctttactgatgaaatctggttctccaggccttcttttgattgcttggttccttagagagcatgggagtataagtataattgcacttcttatatggtagctggcttcgaaaagtgagtgctccaagggactgaacatgaaagctgtcaatatctgaaggcctgggcacataaactagcatggcatcacttccaccatattctactggtaaaagcagtaccatagtctgcccaggttgaaatgagagaacagagaccttaactctcaatggagaagcatcaaataattgtgactctttaatccatcacagatatctaacaaaagtctcactgagttggcactcaagatggaattagtggaaaaaagcctggatttgctttagtctgatagacctgagttatagcctggctttaccatttactaacagtgttctgtctctgagcttcagtttagccatctctaaaatggtggcaataatacatatgccatagagctgttgagaggattaagtgaaaaatataaaatactggatataatgggcaataaatacatgaacctaataataataattgctagtgtttatcgaatatttaccaaatactcagttcacttgatgtatgctatctcatttagtcattatctcttcctagggtggtatgttttcttttgtatgggtcagaaaggacagaaccccatttcctctagctttgtctgtgaacctgctccatttactttggccatttttggtttgataatttggtaatttggtttattgacttgttgttaggatttccattatttcccttttattttgattcctaagaacccaggtgctgatgcacacttggtactttttgacactaccttttcagcatttgttctcagtgctgtcagcttaagtttttgacagcttctcacacaatctgtcagctctctctgaacccacgattgcctgcttatcagagccagaatgttcagtgtctttgtttcagtgagtgctctactgtcagctgttattttatgcaagattgtgggtgcttaatccttggcctacccaagaacatcatgatctgcactttggagcaattattcaatttggggcaattacttgtaggtgttctttaaagcaaagatgatgccagaatgtaattgaattttgaaatagcagtatccaaatcagttaaaaagctacttcgtcatgcatgcaaggctgatctcaatctgttgtcattagaggaaggtggtgaccctttcttcccacagcaagttgggtttttgttgcctcatatactgcaagcagtcagctactttttttgagtgttttcaatatggaaacaaataatagaatttagttctggtagaagtcacttatttgttatctttttactctctgctctcaaaatttacttgcctttaaatggaaagaatcactttaatcctttaggaagtagaggacacattaaataatatccaaataagagatttattcattcattcacatattcattgaatcatcttctctaacttaattgtttagagtatcacttttggaattaggttaaaatcctagatctgcacttattagctattggacttaggaaagttactttgatttctctaaatcttgatttccttgtgtataaaatggaattttaggtggttgtgggatgaaatagggacatgcctttaatgtaattaattcatatcttggcacatacaaaatactcagtagatgttggttattattttgcatttggagttagaccttgtactataaatgataagtggccataatatgtttacttattttttactcttaataattctccaaacctttgactcctactacgtacatgttttccccttaagaacaaacaaattgctggggattacatattcctaaaaatgggaggcatcttgaaaatgtatgagatattttgcttttaaaaatacatttcaaggctgagtgtattgtctcatgcctgtaatcccagcatgttgtgaggccaaggcagaaggatcacttgagcccaggaattggagaccagcttgggcaacatagggatacctcatctctacgaaaaaattaaaaattagccagatatggtggcacacacatgtagtcccagctacttggaagctgagttgagaggattgcttgagcctgggaggttgaggctgcagtgagtggtgatcacaccactgcactccagcttgtgtgacagagtgaaattctatctctaaaaaaaaaaaaaaaaaaaaaaaacctgatagaataacaagttcttttctgaattccatcaactcaaatgtcttaaagtgtatttgtttgcatcgtctagccactctgttctactttagttcaaggcttatgaagtctttatttttatgggtaatgtctagagcttcatataagcagatatagtaataccttatttttctgaacttgtttaaagaatttacatacataaatttttctggtaactgaaagtttcctctttagcttcccaaacttcaaaacatcattatctactttttatttaaaacacacactcacctcccttcttaagcacagtattataacatgatataagcattcatcaatcctgctggattatcattattaataatgacaattaacagtagttaataattaactattgaagattattggctcccccaagtggacccagagagctatgcattttatctttttttttttttaatatatgtcttcatttctgtgagatctaatattttaattctgacaactgtctctataagctatctatccctgaccccatctggcacatactttatcttgtagtttgctacttgtaatatctataagcttcaaaatcatatcaccaaactaactggaagtatgtatagaataaaaagtttagcaaagtttcctcttggtgtttgtgagagctattttggctatttagagatctttatttacttaatttttacttgtaagttctttgtgtcttggacagcttggttgtctaattgtttgattttgagataattgaagaaaggggttcttactgtaatttgatgataattctgtaaattggtctagttgggtccacagggaaataatcaacccccgaaaatttgggaaagctagtgtagtttaatcattcagtcttcaaataagcatttactatgcacattataccagcactgtgtgagaatatctcacacaggaggcttgagggggtgattctagcctgttactaaacacatatgtaaaccaaaaacatctgagatgggtttcaatcaatttagaggtttattttgccaagttacagaccatgatccatgacacagcctcaggaggtcctgagaacatgtgcccaaggtgattgggtttcagattggttttatatgttttagggaaacataagacattaatccatggccgagcacagtggctcatgcccttaatcttagcactttgggaggctgaggcaggagggttgcttgaggccaggagttcaagaatagcttgggcaatatagtgaaaccctctctaccaaaaaaaaagaaaaaaaaattatctgggcgtggtggcatatgcctgtagttccagctacttgggaggctgatgtggaaagattgcttgagttcaaaaggtcaaggctgcagtgagctctgatggtgccactgcactccagtctgggtgacagaacgagactctgttcttaaaaaaaaaaaagacatcagtccgggtgcgctggctcacacatgtaatcccggcactttgggaggccaagacgggcagatcacttgaggtcaaaagtttgagactagcctggccaaaatggtgaaaccccgcctctactaaaaatacaaaagttagccaggtgtggtggcagagcctgtagccccagctacatgggaggctgaggcacaagaatcgcctgaacccaggaagtggaggttgcagtgagccaagattgcaccactgcactctagcctgggcgacagagcaagactctgtctcaaaaaaaaaaaaaagaaaaaagaaaagacatcagtcaatacatgtgatgtgaagcatacattcattcagtgcagcaataattcagagatggggcttccaggtcataggtggattcaaaaatgttatctttttttttttctgttcttttctttctttctttttgtttgttttttgagacagggtctcgctgtgtcatctaggctggagtgcaatggtgtgatcttggcttactgcagctcaacctcctcagttcaagcactcctcctgcctcagcctcccatgaagctgggaccacaggtgtgtaccaccacacctggctaattttttttttactttcttgtagagatggggtctcactttgttgcccaggttggcaaagatttcctgattggcaattggttgaaagagttgttattatctaaaaacctggaatcaacagaaaggagtgtctgggttaagataagggcttgtaaagactagagttcttattatgtatatgaagtcttatgggtaaccactcccagaggcaataaatggcaaatgtttcctttagacatcctaaaaaggttctagactctcagccaatctcttcaggatcagaaagtgacctggaaagagaagggaatcctctatagaaagtaaattttccccacaagagacaactttgtaggaccatttcaaaatatgttcaaggaatctttattttattttattttttttgagatggagtctcgctctgtcacccaggctggagtgcgatctcggctcattgcaagctccgcctcctgggttcacaccattctcctgcttcggcctcccaagtagctgggactacaggcgcctgccaccacgcccggctaattttttgtatttttagtagagactgggtttcaccatgttagccaggatggtctcgatctcctgacctcgtgatccgcctgcctcggtctcccaaagtgcttttgggataaaatagtttggtttctttcagggccctgctatctgctatgtgatgctatacttagaatcacgttggaatttggtatcttattgctacagggtgtttgctgtctgtcttaggatctctcttttaatgttaatgctggtcagttgtgtgcctgaactccaaagggaggagagtataatgaggcatgcctgattgccccttcctgtcgtgatctgaactatttttttcaggtttagctgggtccctttggtcccagcttagtcagttggagggcttagaattgtctttttggttttcacaggtataatattgggctagtcacattcatactctaagaaatgagaatcattgtataggttgttataacaatcaatgaaatttcacaattcctgtgaatgtaaggaatttggggggaatgtttgacagggaggttaagaatacagccaaggtagctgaacatggagtggagtttccaaaggctaccatgaaaggatttggaaaggaaaggaggagtagcaaactagcttaggataaaggaccagagcattatgaagatgagaaaactagacatgagagggatttgcattttgagcagtgactggaaaaacaagaaccagagaaatagtggatcaggttctgatggcaagctgataaacactcaggttgtgagaattcactgttgcctagtggttgtgatgtggtggtggacagagttggagaacagggcagtaggtcttttttatattggcctttaagttttggcaggtgggcagcagctagtgggtgagaagtcaaattttgattcagaaagcaaattttgcttaattgtaacccacattttaaaatctgtaatagtcttttttttctaattggtaaattgtggtcaaaaccagtccaggataattgcttagtatggtaatgaactgtgttcatttgtttttatctcctggcctgattatacttatttcctattgcttttggtttcttaaataatcagctgagtaaaccccaaaccaaaaatatttggtttatattttaaccaactgaatatttgtgtttatcattcattccttccatcattatgttatatttctggtacctgaatgtgaaagtttatgttagcaaatcataacaggaatacactctaaatatctgggcctaatccttgcttctggagttatttcagagacagaagaagcatggtttattataagttttttggatagcacatttggtatagctccatatccaaaagccagccagaatgtatcagtgaccaagatgaagagggcacatcaaatagaccctggacttatgggacttatgccaactcatacttgaaatatcttttttcttatgtatgatgacttgcatggcaaggaaacagcacattttgtagcaaacatttctgattgttacctttatcatataagattctctatcttttgaatttaataactcaatgtctcttcagagcaattgggcagaacccagagttcaaaattcagttctagaatagcttcttaaggaacaatttaatttgtttatttctaaagaaatattgctatggttttcagaaaaggaaaggaagtctggcagatagcccctaatgaccacctctagttatacaaataatacttgaaagcaattgctaaaacaaataagaaaacaataagaactgtagtggaaatgcagtgtgatacttaaagcctccagtacacaatctgtcccacttatcagcaacactgccttgtttttttttattttattctgtctgccacttgcagtttaactgtaacaccgagatgtccagattagggttaggaatttcaattaataattttagacttctgcatcattatgccagcttgagcaaggaacttgactttcacaagacttaggcacatgcaaataatccagaaattgactgaagggaaataacttattgtaaaaacaattttatgtgaacattgattaaatagcacctaaaatttataacaagccactcagggaaagaaaatacctttaaaaaaaaactcatggtttaattattgtttgtgaagatgaaagcaattaggaattttattaaatatatgtggaagtcttggggaaataataaaatagtgatacatgtggcagtactaatcttcactttctttttctatttcagggtttgaacataatctttcatgtagctttggctctcctaaaggtaagtcttttttttaatcttaagttaccacattctcttacctctttgcccttggaactggaataattcaatttacagtctttgactcatttcagtttctcagacacacaaaaatagatgacttctctgagaaactctgatcctcttccctcctctcatctttttctgttgttgtttatttggagtcttttttttcttataatccatttatttaatggtactatcatagagctctttccagtaacataaaatatctttttatcatatgaattggatgatataagagaaaaggttaaaaattgttttctgtcaaaatgatgcctgcttttttcttaaaacactttttactataacatctctggaggtacctaaacatataattgaattattaaaaagtttttataatatactgactaaaaaagaaactgctacatttcaatttgcagttctttccatgatagttagaaatttataaaacactttagaattctattgtaattaccttgttggattttatgtcaacatatcatacagctttaataatgtggtaactgcaaggcatttgctgcagagttgatgaagataacccagctggtttttgtccttcagtcagagaagacattctgatattaaaggcaataattgcctcaaaggcacaggcttaccctttcctcagtataacatggtggttaaaatggcagacctggactcagacagatttgcttctaatttcagccctaccatatgaccttaggcaaatttttctaagtgctcaaagtctgggttttgagataataataggaattaatttatgggattgttaaaagaattgagatgatcaaagaagtccttagtatagtatctagaacattttactgcctagtaaagttagctgtcattattattgttctttacaaggtgactcagaatgtgttcttagatcccttatcattcttctgaatctctcaaaagataatgatgtggtatcataggaggacctcttgatacgttaggagagccttaaccatacctaaccattaacataaccttgattctaaacaaaggcatgaaatagtacaggccctctgcaactcagtaagtggatttctattcctcatctcttattcctttacacatttgctctttgtgaagttcataagatacactttttaaaattaaatcgattgtgtttatatattttttatgccaaagctatttagaaaatagaaaaatattttaaataaaataacacaaacatatttgctgtgtcccttaatgaagtcatgggttttgacctctaatttttttctttcattaaaacaaatccaagctgaaactttccaacatgtcctctcaacagggctggaataagacttttagaatgcctaagcattgaaagtatatgtaatacagactaaaaaaatattaaaacataaagtaagtataaggaggtccaagaaagttctgatttctcatattatatctaatgttttaaactctcagatattatgtctttcctaaaatgcctttcctcatttttttggtgacttatctttactagtgctttcactgaatgcttaatctgtcttttgagtaacccaggactacctctctggatatcagacctataccctgtgtcaacttaatactatatacattagtaaattatcttcttgattgacatgttgacttgttcatattattttcatttattttgtccatgttaacacagacaaggcctctacagaggacatactctggccactgggcaggaaggctttgtctgtcttctttagcaatacatgggcactcttgtagcatcatcttagagaattttactagttagagaagataaaaagagccttctcaccactagtgccctatatttatgtaacttccttatatgaatcctgaagctgacccccccaatagacagagtatatatgggactaaactgaagtgtactttaatgatctattgccaccacttggaaaaaaagaatacgcaaacatatatgacagtcactgactttcagcttctagtgtagtataccagataaaataatatgtatttgtttatatcaaaattaaaaactttggagaagttcaaattgctgggtttttttttcttttgttttgttttgttttttgctttttgagacagggtcttattctgctcactctgttgcctaggctggagtatagtggcgtggtgatagcttactgcagcctcaaattcctgggctcaagtgatcctccctcctcagcctcttgaggagctagaattacaggtagatgccaccatgcccagctaattttaaaaatattgtagagacaggggtctcactatgttgctcaggctggtctcaaactcctggactcaagcagtcctcctgccttggcctcccaaagcactgggattataggtgtgagccaatgagcctggccttcaaagtgcttatgaattgagcctaaggaattttcagtatagctacagagagacttcagatttctctgtattataagcatttcttgtgatgaggggacagaactaacatttcttgaacatttatactctgtgttaagtactaacagattatctcattaacatacattaaatgtctaggatttatttgtagaatagtaatggtattagccagagaaaacatctaattcttcccccagcccctagttgataattgagagatcaaagctcaagatcaccttaagacttttgtctcagtagtgggaaagttggatttataatttttttgaatgggatagatataggatgaattctgtgttgctcagttaggttttaaagacacctactttctgaacgggaccaacttctttttggttagtaatagcctatcaggtagctaaaaagctatggacctaaaagaatgattcacaatactaggcagcatcatgaaatcattttgtgtccagtaggtaggtcagatatattcctccaaatgtaatttatttacttatatgaaacattaggtagtcatagaatacattcaatagatttaatagactggagatgatcagtcagaattgttcttagcacttcatgttgggcacagaaatttttcagtcagaataggttttttgtttgctgtccgtggttaaaagcaaatgacagagtgtttttctctggccttcccaaagtattatatgcttatttcgtgtcctacatgtgtatgcagacactacagagataaagaaagcccaatcataatcctgttcccagggatgaccataataaaaacttggtataaaacctttatcccatgctttggcctatggttatataagtatgcattacctacctatacacatatgtatatatgtatgtatgtatatttttaatctgagtttgagataagatgggaaagtgggaggaaatccagaagaacagtgtgaaaggatgcacataaatttattttctttcaaaaaatgctgttgaacaatactctttttcattcagtatatcgtgaatatctttccatgtcactaaacacatgtaagggttaaaagcatgtggacattggagtcagactacttaaattcagattcattcaaaacaatttatccaatggtcttaggtaaattacaatttctccattttttaaatgggggaatattagtaataccagtctcataagattgttgtcagagtttaatgagttaatatatgattgatgcctagaactcagtactacagtgtactgaggtgctattgttagagacagaatttctcttttgactggtttttatcctactgtatgtgccataatttattttgaggcagagtctggttctgttgcccaggctgcagagcggtggcacaatcttggctcactgcaacctccgcctcctggggtgcaagtgattctcctgcctcagcctcctgagtggctgggattacaagtgcaagccaccaagccctgctaaattttgtatttttagtagagacggggtttcaccatgttggccaggctggtctcgaactcctaacctcaggtgatccacctgcctcagcctcccaaagtgttgggattacaggcatgagccaccgcaccctgccctgtaccatatatatatatatttttttttgaaagccactgactttattgatctaaaaaactttacaaggacagtgacttttctgccaaaaaaggagccaaatggtatcaaacggactgaaattgagggtgggggtgagggatggggccaggaatccattcaggaaagctggtgactgtccccagggaagtagcaggggaaaaaggaaggcggaggcatgcaagagtgagaatccaaaaaagttaaaatgattaggagagaaaactcccaaaagaccctggagtacattggaggtgagtaggacaatagcagtcttttcctttgttgaggacaggggaggagtccctactcggttgcaaactccggatgagggctggggattgagggcttcccagaaagcatcacaagaaggtgtcacaccactctcgaaggcatctgaagcagtcctgggactgcttggcattggcaccaccagtgtccctcagccattctcagaagaggtcttcatctttctttagcaccagaaactggccaaggacaacataggccttgtcaaagcacccttcctccagcttcttgtccataacttcaccaatcccggccaggctccctactggcttttcccccacggactctgccacaaagtctcggtgcttttgggaggttgtaatcttgttcaggtttaattgtcagcttcagttcccataatggttcctcctgccacctggctgctcctgcctatacctcaagccactagaactttcccctgtaccacaatttatttaaccaattttatatttagtttttatggacatttgtttccagaatttcctgttaaataaaaccgtaacaaatatccttaaacttgcatctttgcatacttatctgatatctctggggtaaatttctagagatggaattgctaggtcaaactgtaaccaaattttaattttggatacatattacaaaattcttctctgctagcaatgtgagagtacattttcccatactcttcaaaaatttctaaacattaagcacctttatggaaatcaaaagcaagttataaatataaatataatatataaatatataaatttatttatacataaatataataaatataaatgtaaaacaaagcaatttaaaagtaatgatttagtaattttttattactaaatcatataaataaagctcttcagccagctttgaagactccagtattttcttttttggggagaatatccagtttctttagggaagcagtggatcatggctaaattctagaagactggaccttctcttagtttggaggggcttatataaaagttctgacactttagggggccaaggtgggtgaattaggtcaagggttcgagaccagcctggccaacatgacgaaaccccgtctctactaaaaatacaaaaaacgccaggcgtggtggtgggcacctgtaatcccagctacttgggaggctgaggcacaagaatcgcttgaacccgggaggcagagtttgcagtgagccaagattgcaccattgcactccagcctgagtgacagagcgagactccatctcaaaaaaaaaaaaaaaagagttctgaagtgtatctttgatgtttttggcttttcagccctttccagtatggtttttccttaccattccattgaagcttttttagtatcttacttgatccttcaacagttgtcaaaacagcataatgacatacacaacgcttccttttttttccccttctttttttatgttttggaaacatcttcccttggtttctgtcctttcttttatctccccctctgctacttctgtctttttttttcctcactcctttttccccctagccattagcttggagttctacagatctccagcctctaggaatttgcttattgcttctcccttgttgatcttattcattcccctggtttcatctataaatgtttactctcatttatttttattttttttaatccctcaccgccctcccaccctttccccttctgagtctccaatgtccattttctactttgtatgcttttgcatacccatagcttagctctcacttagtgagaacatttggtatttggttttccattcctgagttacttcacttaggataatggcctcctctttcaagtttctacaaaagacattatttcattcttttttatggctgagtagtattccatggtgtatatattaatatatcacattttctcatctactcctcaggtgatgggcacttaggttgatgtttactctcatttatatttaatccaaacccacatatttggctgtggactgaacatgtcggcttggatgtttcacaggcacatcaaaagtcaaaactgaaataatgtgccctcccaaatgtacttttcatctagtaacctccacttcagtaaggactctacccagctgctcaaaccagaaacctagaagttatccttaactctcttctcaatatcccatatcagttcagtcaccaagtcctgtggattctacttcttgaaaatttttagaatcttcccacttttctcctattcttacttaggtagcttttaggccaccaaattttccaggaagatgatgccctcctggattattgcaggacctcctgtaataataaatattggatacctatgaagtgccaggtactgttctagacattggagataaagtagtaaccaggaaagaccctgctttcatggaacttgcattccaatgagagaaagatagtaattaaacaaataaatgaatatatatgttagttcattcttgcattgctataaagaaacattcgaggctgggtaatttatttaaaaaaaaaaaaaaaaaaaaagaagtttcagccaggtacattggctcatgcctgtaatcccagcactttgggaggccaaggtgggcggatcactggaggtcaggagttagagaccagcctggccaacatagtgaaaccctgtctctactaaaaatataaaaattagccaggcatggtggcgtgtgcctgtagtcccagctacttgggaggctgaggcaggagaatctcttgaacctgggaggcagaggttgcagtgagccaaaattgcaccactgcactccagcctgggcaacagagtgagactctgtctccaaaaaaaaaaaaagaaaaaaaatggttttattttggcttacagttcaacaggttatatacgaaacatagtactgatatctgcttctggtgagggcctcaggaagcttacaatcatggcagaaagcaaggggagctgtatatcacatgacaagaggagaagcaagatacagaagggggaggtcccagactcttttacaacagccagatctcacgtgaactcactgagtgagaactagctcattagcaaggggatggcaataagccattcatgagggatctacactcccatgacccaaacacctcccactcggccctaccttcaacattggggattacacttcaacatgagatttggaggggactacacttcaacatgagatttggaggggacaaacatccaaaccatatcaatatgattagtttagatcatgctgaggtttatgaaagaggtaggtttgagaagatggtggcttggatttgagtgttagcagtggaactgacagaagtgggtgactgcactttccccatatactcttgaccattgttgagtccgttgccacactgccagtagtctttttaaagcagatttttttttttttactttgaatttcaggggtacttgtgtaggtctgttatatagataaattgtgtgtcatgggggtttggtatacagattatttcttcacccaggtgataagcatagtacccaataggtggtttttggatcctcaccctcctccaccctcaagtaggccccatgtctattgttcccttctttgtgtccacgtgtactcaatgtttagctcccacttacaagtgagagcacgtggtatttggttttctgttctgtgttagtttgcttcggatgatggcctccagctgcatccatgctgctgcaaaggacatgatctcattctccttatggatgcatagtattctatagtgtttaccacattttatttaaccagggtactgttgatgggcatctaggttgattccatgtctttgctattgtgaatagtgctgcgatgaacatgcatgtgcatgtgtctttatggtagaacagtttatattcctttgggcatatacaaagtaatgggatggctggatcaaatggtaattctgttgtaagttctttgagaaattgccaaactgctttccatggtggctgaactaatttgtattcccaccaacagtgtataagcattctctttactcttcaccctcacccagcatctgttgttttttggctttttaatactattaaagcagattttagtcattattcaacaatatttagtaaacacctatttagagacagatactgttctatgtgcttgaatagaaatgagtgaactaaagtaacaaagctacttgcctctgtggaaattattttctagcaagagacagttgataattgtattagttcattttcacactgctgataaagacatacacaagactgggcaatttataaaagaaagaggtttaatggacttacagttccacgtggctgggccaggcctcacaatcatgaaggacggcaaggaggagcaagtcacatccaacatggatggcagcagacaaagagagagggcttgtgtagggaaactcttgtttttatttatttatttattttttaatttaaaagtaaactttaatgtcaaaaatgcaaacttgaggaggccagaaagatcacacacaagactgccacttcacacttggatggttgcacagcagtccggcagaggcgctcctcacttgccagacagtgcgggggccagggagaggcactcctcacttcccagagggtggcacggccaggcagaggcgctcctcagttttcagacggtgcagccgccaggcagaggtgctcctcacttcccagacaatgcaggggccggggagaggcgctgctcacttcccagcagaggctctcctcacttcccagatggtggggccgcctagcagaggcgctcctcatttttcagacggtgcggccgccaggcagaggcactcctcacttcccagacggagacagtgtgggggccggacaagggccgaacagaggcattcctcacttcccagacggtggaaactcccgtttttaaaacatcagatctcatgagactattcactaccaggagaacagcatgggaaagacccaccaccatgattcaattacattccaccaagttcctcccacaacacatgggaattgtgggagttagaattcaagatgaggtttgggtggggacacagccaaaccatatcaacaataaacataataaatatataaatatagtatattagaagttatagtattatggggaaaaggaaaagtaccgcagggtgatgggagttatgggtaggttgcaatgttaaatagggtagtcaggataggccccaactagagggtgagatttggacaaagactgcaggtagtgaggggatgctctgtgctgggagtgtgactgagtgttgagggacagatggaagccagcgagactgcaacaagagagtgagggaagggcggtaggagatgaggtcagagaagtaaattttttcttgcttaaagtcctttaaaggcctccattgctcttaggataaagttcacaattttgacacagtccacatagtttttatgatctggcacaacttacctctccatcctcaactgccccttccctccctctcatttgcactgtctcaatcaagccataatgaacttctttcaggttttcccaatagaccaatctgtctttcacttaagagtcatcacatatactggtttcctctgccaggaatgctctgtctccctctcttcaataagctaatttccatttagctttactacgttaggaactttctgtgccttctgcaaacttaggttagacagtgaaaacacaggttccctttgtcttctaggacatctatttgacagtcctttgcatacttgggactgatacctgattaaatggttggttggttgttgtcttcctcattgtagttaatctctatgtggggtctgcccactagtttgcctttgtattggagttgctggcacatagtaggcacttaaatatttattgactactgacttagagtcaaattgagaaagcataggttttcttttccctcacttcctcctatgtgtatatgaataagaattctgccaggatagcagctttttcaacccaggtctcctttgctttttttttttttttttttttttttaagatagattctagctctgttgctcaggctggagtgcagtggctctatctcagctcactggaacctccacctcccaggtttaagaggttctcgtgcctcagcctctggaatagctgggactacaggcatgcgccgccacacctggctaatttttgtatttttggtagaggcaggctttcaccatgtgggccaggctggtctcaaactcctggcctaaagtgatccacccgccttggcctcccaaagcgctaggattacaggcatgagccaccgtgcctggcctcctttgcttttaaaaaccttgaaattaattgctcttgtccccagtatttagcttctctcattttcattattgagatataatttatgtgtcataaaattccctttaaaaatgtacaattagtggctgggtgtggtggctcatgcctgtaatcccagcactttgggaggctgaggtgggtggatcagaggtcaggagatcgagaccatcctggctaacacggtgaaaccccgtctctactaaaaaacaaaaaattggccgggcgcggtggctcacgcctgtaatcccagcactttgggaggccgaggcgggcggatcacgaggtcaggagatcgagaccatcctggctaacacggtgaaaccccgtctctactaaaaatacaaaaaaattagccgggcgtggtagcgggcgcctgtagtcccagctactcgggaggctgaggcaggagaatggcgtgaacctgggaggcggagcttgcagtgagccaagatcgcgccactgcactccagcctgggcgacagagcgagactccgtctcaaaaaaaaaaaaaaaaaaaaaaaaaaaaaaaaaaaaaattagccaggcgtggtggcaggtgcctgtagtcccagctatgcaggaggctgaggcaagagaatggcgtgaacccgggaggcggagcttgcagtgagccgagatcgtgccactgcactccagcctgggcaacagagcaagactccgtctcaaaaaaaaaaaaaaaaaaaaaaagtacaattagtggtttgtagggttgtcacaaacttgtgcacccatcacctttatctaattctagaacattcttatcaccccataagcatagtagccacttcccatttccccatcctatcaccacctgacaacttctaatctgttttctatctctgtagatttacctattctgaacatttcatataaatgggatcatatgataagtggtcttttgtgactggctttttttccttagcataatgttttcaacgtttatccatgtcgtagcatatatcagttcttaattcctttttattgctagataatattccattgttcaaatgtaccacattttatttatccattaatcagttaataaacatttcagttgtttccattttgattgttatgaataatactactgtgaacatttgtgtacaaggttttgtgaacatatgctttcagttctcttggttatatgcctaggaacagaattcttggatcatatggtaattatgtgtttaactttttaaggagctgccaaacagttttccaaagcagctgcaccattacatcccccgtggcaacgtataagtatgttgtaaggcctaaaattaaagcccaatatgatgtgctgcctcaacatctggcagaaatcaggaaggcctccagtcacctaagtgcaaggtctcctccttattttgctcctgtggataaggtttcctagccaaacaaccctccttagccaaagggtgaggcgctgttcttttctttgattttgtttttttagggctggggtctcactctgttgcccaggttggagtgcagtggcacaatcatagctcattgcaacctccaattcctagactcaatccttctgcctcagcctccaaagtagctgagactgtaggcgtgagccactatacccagtggcattgttctttcttagagtagcaaacttcagttccttgccagcctgtgtcattattcagacaagccaatcacatcatcccaggggagctagggggcaccccactctcttgataccataaagctgcctcccacagcccctgattgttcactgtgttttaatccagcccttccatgatgttttcctcccttggggatgtgaatacctgttactaataaactactgtcaatctcatctgtccgtgtcaggtaaactactgtcaatctcatctgtccgtgtcaatctcatctgtccgtgtttgaccatggctgcaaccgtagggcaggaattcctcccgtattagcagggtgaataggagacaatcgaaacaatgagggtttgattcttctacatccttgctaacacttgttattgtctactttattttttattatagccaccttagtggacatgaagtgacatcttgttatgttttgatttgcattctcctgatgtgggacatcttttctagtctacagccataccaccctgaatgcgcccgatctcatctgaacatattttcatgtgcttattggccgtttgtatatcttttttggagaaatggctgttcagatcctttgcccactttctaattgggtttcctgcacttttattgttgagttgtaacagatatatattttttgagtcagggtctcattctgttgcccaggctggaatgcagtggcataatcatggctcactgcagtttcagactcctgggctcaaaggatcctcctacatcagactcccaagtagctgtgactacgtgtgtgccaccatgtccagcaaatttttttttttttttagagacagggtcttactatgttgcccaggctgagctataacagttctttatatgtgctgggtattgcctcccattctgtggactgtcttttcattttctagataatgtcctttgaaacacaaacatttttaattttaaggaagtccaatttattttttctttagttgtttgtgcatttggtgtcatatctaaggtcacgaaaatttcttcttctaagggttttataattgtagcttttacatttaggactttgatgcattttgagttaatttttgtatatgatgtaaggcagggcattatggctgaatcgtgtttcccccctacccccaaaattcatatgttgaagtcgtaacccctagttactcagactgtgacagtatttggaaatagaatctttaaagaggtaattaagttaaaatgagctcattagggtgggccctagtccaatataactagtatccttaagaggacattgggacacagacatgtatggagagaagatcatgcaaagtcacagggagaagacagccatctacaagccaaagtgtgagaagaaacaaaccctgctgacaccttgatcttagacttctagcctccagaactgtgagaaaataaatcactgttgttaagccacccagtctgattcctttttatgacagccctagcataccatacactaggggtacaccttcatcctttagcacatggctatctacttgtccccataccatttgttgaaaagactcttctttctcctttggatggtcttggcatccttgtcaaaaatcagttgaccatggacagttttatttctggagtctctattcccttatctgtgtgtctgttcttacaccagtaccacagtcttgattactctagctttgtaataagttttgagataaggaagtgtgcattctccagttttgttcttctctttcaagattgttttggctattccaggtcccttgcattttcatatgaattttaggatcagtttgtcagtttctgccaaaaaggcaataggattttaatagggattgctttgaatctctgtatccattgaggagtaatgccatctgaatgtaaaccaaaaatgaaatcctaagccccctgaccattcttttacctcagtcccttgacaagggcatctcagaggtaacctgaaaaaacaaattcagcccatgatgggggaaggtgggagtctgacatgcctcattatgccatcttcccttttggaatcaccaatagaacagacttgttaagtctgttaaacatttacaatctattctctccaagcctgctatctggaggcttcacctgcatgataaaaccatggtatccacaaccccttatcttaacccagacattcctaagtgtttagacaacaacttaactttttcaaccaattgccaataagaaaatctttgaatctacctgtgacccggaagctcccacttccccgttgtttcacctttctggaccaaaccaatgtacatcttccatggatttgattgatgtctcatgtcttcctaaaatgtataaaactaagctgttctccgaccaccttgggcacatgttttcatgatctgagggctgtgtcatgggccattggtcatttatatttggctcagcataaacctcttcaaatattttacagagcttgactcttcatcgacattaacaatattgagacttttgatccatgaacatgaggttttttcacatttatttaggtcttatttaattttttttgatgatactttgtggtttttagcatacaaaagtcttaaagcacttgaaaaaatttaattctaacttttattctgcttgatgctattgtgaattgaattgtttgttaatttcattttcactgcgtcctcattactggtatccaaaaatacaactgactttccttttttttttttttgagacggagtctcaccctgtcacccaggctgtagtgcagtggcgcaatctcggctcactgcaagctccgcctcccaggttaaatagaaccaacttatctatattgatcttataacctgcaaccttgttgaactcattttcagctttaatattcatgtatgtgtattgtgtgtttcccaagatttttgaaatacaagatgtcattgtattagtatgttttcatgcagctgataaagacatacccgagactgggcaatttacaaaaaaaaggggtttattggacttacagttccatgtggctggggaggcctcacaatcatgcctgaaggtgaaaggcacatctcacgcggctgtggcaagagagagaatgagagcaaagtgaaacaagtttccccttattaaaacatcagatttcgtgagacttattcactaccacaagaacagtatggaggaaaccacccccatgattcggttatctccacctggtccctcccacaacacatgggaattatgcgagtacaattcaagatgagatttgggtggggacacaaagccaaattgtatcagtcatcttgtagacatatttttacttcttcctttctgatttggatgcattttctttctttttcttgcctaattcctctgactaaaacctccagtactggcagaataggtaactaggcagacatgaacaggacaggagagggccctcctccccaggaatgtcaggtgaccatcaggtaatggtcatgcagttgttaaactatctaacataatggttgtagcttgcgccagggaaaggctgtctcccaatagatagaaaccacctgaagctggtgatcagcagcttcttaataagatctcaggattttgcgagtaggctcaagcatgcccaccaggaggcaaactggtggagtttaacaggtatatgaccctcctctgggaacactagtcaactggtaagggaaaaatacctcaaatgaacatgcacacaacttcagtaaacacactgtacatgcggccccaccccagggctagcaggccactgtgcatgtggacagcccaccccaagggaagaatcaggggagaagaaacacaaaccctggaatcatgccaatgtataaaaccctaagtcaagggtcagacagtatacttgaatctctcaagttgcctgcttggctcacttccaagaatactttacttcctttcattcctgctctaaaagtttttaataaattctcactcctgctcaaaaacttgccttaatctctcactctgccttatgccctcttggacaaattctttttattgaggaggcaagaatctcgagttgctgcagacctgtacagattcactgctaacagtacaatgttgaatggaagtggcaagagtaattatctttgtcttgttcctgatctcttttaccctctatcagaaaagttttttttttccttagaacttcatttctggattactactgtcaccaccattgtcactgtaaccacctgacaggtgcttcctgcccactgcacaaacaaaatcaattcatggagcattgcagtaaagaaagaggttaattgatatgaagacagccacactttgcaggtgatggaattattactcaaatcagtctcattgaaggttagggattttcccaaggtagtttggaagaaggggtggaggtggctagacaatggatacttgctgctgattggttgggggcacaatcataggggtgtggaaaacggtcatcttgtgcgctgagttgcttctgggtggggccacaggagcagttggtgggtccaggtggagccattggtgtcatgcaaaaaacctgaaaagatatcccaaaaggccattcttaggttctataatagtgatgttatctacaggagtaattgggaaagttgcatatcttgtgacctccagaataatggctgacaatcacgtccacaccatagaagaattcaagctcctctatccccctagcctggtggtctctcattagctttacaaggtcggttgagttttggggaaaggctattatcatttaaactataaactaaatgtttcccaaagttagcttggcttaagcccaggaataatgaatggcagcttgaaggctaaagccaggaggggagttggctagatgagatcaagaagttagccgggcatggtggtgggcgcctgtagtcccagcgactccagaggctgagccaggagaatggtgtgaacccaggaggcagagcttgcagtgagccgagatcacgccactgcactccagcctgggcgacagagcaagactccgtctcaaaaaaaaaagaaagaaaagcaaaagaccttgaaactggaaaatggatttcagttctccctagtctttgatgtaccaacttgggttaaaagttcttgtttctgtgtttgaagatagtgacttaaggaagaactgaagttgggaatgtagtttctgtagttaatattcatgttacaaaaatagaagtctaaacacctgaaaaaaagaatgaaacaactcataaactttttttttggatttgcaatgattttgtacattccattagttttgtaactttcatgaaggaatgcctattgtcctgttggtggcagtaaaacaccactcctggatcatttgttacttgaatatttcatttgtttgtttttaactttctctagtgcatcttcagtttgatgataggttagtttcaagatgctatctagtaaatgctaaaacaaaccaacaaacacaaatactgggcttctaattaggatactcaaggaattttaaagttttaaagtttcagaaataatacattttatgaaacagggatctgtatcaggaaaaaatgtatatcatcacagtaccatgcacatattatataataccttaaatttgttgaagcaatttctcattacttatttctcatgaaacaatccaaaatatcaagaagggaagacagttgaataaacacaccatttccaagtagtcagtgattaaattgaacttaatgtaccctaagaaatacaagctcccttgacagagaacaaacagaacaaaaaaatccagtttcctccttgttctatttttgtgagcaaaataagtactcatttaagcttccatcccttttacttaaaaatccctctctgtcttcatcctcttctgctttgctcttgtctttaatgaaggtctgttctgcccccattccaaggctaacttcctcactatgtccttgatcccatctttcctgtctctctttggagaagcctgtgatggttagttagttcacttattcaacagatattcactattgacagtccctgggttagatgtcaggggatacagagatgacattctgtgtcctgaagttgtcacatctaataggggaggcacacagacataagaattcagtgtgtttgatcctggggtttaaaagggatctttgggagcctaaaggcagaatgccaaattcattctgggaaactagtaaacattttccaaaggtggcatctaacctgagaataggacatgagggtgagagtgaacagcatgtagaagaggaatgaggaagaatggctgaggcaagtcctttgccatggcacatttgagggggatgcgcaggatacgattctgaggggctttaattacatttctgccatcaatttattgtggaattttaatcaaatcatctaaccttttaacacttaatttcctaacttataaaataaagagacagggaagcatgctctaaatttatgtcatgccagctgtgtcaatctgtgctataggtgtgtgtatatgtgtgtatgtttgtatgtcttatataaccatttcagtcctttaatgagtagataagaatctttgtataatttgcatgtttgttgtttaagtgcttggctaaatttatctttgcctcttttacaaaaaaaaaagtgtttacagaacaatataataaaattaggagcaaaggaatattttatttgttatacttcaagatgaataccaccaaaatgttttcatttcaacttaaaaatctctttataaccatacttgaatataaacaacccatttgttctacattagtgaaatgttagtgtgtgtattttctagcactcacacctctgcactgtgatcattctatcaggtatttctagatatccaagcaatgtgttggatctatgtaaaaaaaatctgacagctaccatcaataacaatataattgtgtagcatttaaacagtttgtaatgagctctcaaatgcattttttaaatgtttaataaataaaattaatagtaagacacctatcatttattgagcacttaaaatgtatctgatgctgtgctaagcactttaaaactaatcttcacggccgggcacattggcccacgcctataatcccagcactttggaaggccgaggcaggtggatcacgaggtcagaagttcaagaccagcctggccaagatggtgaaaccccatctctactaaaaatacaaaaaattagccgggcctggtggtgggtgcctgtaatcccagctactcgagaggctgaggcaaagaattgcttgaagccgggaggcagaggttgcagtgagctgagatcacgccactgcactacagcctggacgacagagtcagactgtctcaaaaaaaaacaaaaaacaaaacaaaaaaaaataactaatcttcactacctttaattttgtttattgtagtataatatacgtaacataaaatgtacaattttggtcagggcagtggctcaggcctgtaatcccagcactttgggaggccaaggtgggtggatcacctgaggtcaggagttcgagatcaccctggccaacatggagaaaccccatttctactaaaaatacaaaattagcgggtgttgtggcgtgtgcctggctactcaggagactgagatgggagaatcgcttgaacccgggaggcggagcttgtggtgagctgagatcgcaccactgcactccagcctgggcaacagagcaagactccatctcaaaaaaaaaaaaaaaaaaaaaaaaagtacagttttaaccattcctaagtacacagttcagtgacattaggtaaattgacattgttgtgcaactatcaccaccatccatctccagatctttttttcatcttgcaaaactgaaactcttgcacctgttaaatagtaactccccattcctttctccccttagcccctggcagtcaccattctgctttctgtctctatgaatttggctactctaggtacctcatgtaagtggaattatatcgtatttgtcttatctctggcatatttcacttagcatagtgtatgacccttaatttttttactgacattaattaaaagaaatcctaattttaacaataattctattactgttaatattgtattactattttatcagtgattctattactgttaatactgtattgacttgttggtatgaatcaatatgctcattttacagattaggaaactaagacttataaaaagttaaaaaacttggttaaagtcattcagttaggcaaatgacataccacaatcacaactaggcctgtcttactacagaggcagtgttcttaacttctaagctatggggtgtgtgtgtgtgtgtgtgtttattttaaaccttacaattgctctgtgaacaagagattatatcctacttgatactcaaatcccaggcatggcgacatatgcctgtaatcctagctacttggaaggctaaggtggaaagatcacttgagcccatgagtgcaagactaatctgaacaacatagtgagacccgttatctaaaaagtaataaacaaataaataaataaaagccaggtggctctcactaaaaattccatgcctttttacgttatacagcaggagacccttaaattatagtgaaatcagtctccattccacaaatctatgttgacatcatactatgagtgaaaacaggttttttaattcaagttgtttgaattaagcatattctattgtatgttcaaagatagttgtcccaatttaaaaatgtccttggttgaataggatagaagcagagccagagcaaccaagagccattgctatatgaacaaataattgaatttaggctaatgaaaatgaactcactgtcaaaaatcatcatgaaattaaaatattctctgctcttgactggctggaataatatttgattcctgagttctgcctttccacttattctgtcataatctttgagatatatgaagtcatccctgaatactgtttaatgctctggttaaactccatttcactctgaccaatcagagtatgtgagctgatcataaggagctattatcaagagacttgtcagaggattcactgcccaatatgtttttatgaccctttttatctgtaagagttgctggtattgctttttagaatgaaatagactaattttgtccattacagtgttgatagtttgataactcactgtgggaatcaattgatcttatcagaataatataaccagtagaggaaatgtaactgaagcatatacagttttatttaatatattgtttatgcaggttgagaaaaggctgaaatatgctccttttgctagaaatgtaataactaaaacgcccatagccttgatcttttttatcttttattgcttttccttgactaagagaatttggttttggtaaagctaaatgaatttagaataaagtcatttatttgtgtcatacgtaagcttgattaagaaggtttttatggccaagagccatggctcatgcctgtaatcccagcactttgagaagctgaggcaggaggatcacatgagtcttggagttcaaaaccagcctgggcaacatagtgagatcttgtctctacaaaaaataaaaataaaaaaaatagcaaggcatagtggcctggcattgcactccggtgatcacaccattgcactccagccctgggtgacagagtgagatcctgtctcaaaaaaacaaaggaagattttttttttttctatttagaaagagagtgcataaaagagaaaccataggcagggacagtacctcatgcctgtaatctcagcactttggcagggcaaggcaagcggatcgcttgagtctaggagtttgagagaagcctgggcaacatagagagacctcatctctccaaaaaatacaaaaattagccaggcacgatggcacgtgcctgtagtctcagttatttgggaggctgagatgggaggatcacttgggcctgaggggttgaggctgcagtgagccatgattgtgcactgcactccagtatgggcaacagagcaagaccctgtctcagaaaaagaaagaaaccataaaaagtataatggcttgaaaaagatggtgtatttctcccacagatattaatctagagagaaaatgactggccccaaaaggcagatagctcagttacataagatcactcaaggactcaggttctataatgaatttgttcaattatctcttaggatgttgtcctcatgtacatggttaaagtcagacacatctttcaattcggaggaagagggaaatttcaagcaaaagtggagggaaggcaatttccttttaagcaaatagtgaggaagttgcatacatcacttttattcacattccattgacaaaaattttgtccatggccacacttagctgcaagggaactaggaaataattgtctgaaactcagcagccatgtgccgtgttaaaattattatatttatggaaccaggagaaaacttttttttttttttttgagactgagtttcgttcttgttgcccaggctggagtgcaatggtgtgatctcagttcactacaacctccacctcccaggttcaagagattctcctgcctcagcctcccgagtagctgggattacaggcagactccaccacgcctggctaattttgtgtttttagtagagacagggtttcaccatgttggtcaggctggtctcgaactcccgacctcaggagatccgcccaccttggcctcctaaagtgctgggattacagacgtgagccactgtgcctggccgggagaaaactttttaagaaaacaatcagcagtctatatagtctaccctactgacctttcagtgtctgtgattacctatattctcacacatagacactccctctctcccaagggagacattccaaggctcccttggattagttcatctgctcaaagtcaagaatacccggatggtgcacattcctgattttcaggtctgtgatggtccctcacagttcactaatgtgttttctgttcatctcacatccagtatacaaaagtggtaggaaaaatataactgcaataaaagctgtcattcagaagatggaagaatgggaaacatgtcacagtcagtccgtaggaatttccaagattcttgctatttcagtagaggagatttcttggttagcctgtgtagctgtcccctggttctaatttctaagaactacaccattttccattgtcctccatggccatatctaaagttggtgttagaggccaggcgtggtggctcacacctgtaatcccagcactttgggaggccaaggcaggcagataacttgagatcaggagttcaagatcagcctggccaacatggtgaaaccccttctctactaaaagtataaaaaaaaattagctgggtgtggtggcaggtgcctgtaatcccagctactcgggaggctgaggcaggagaattgcttgaaccccggtgggtggaggttgcagtgggctgagattacaccactgcactccagcctggacaaaacaatgagacttcatctcaaaaaataaaaaaaaaataataataaagttggtattagagaatagtacatcctcctagggagctgcacactttcaaaaacttgctacttgtggagatttggaagcccaagagttgtgttagtgatcaaacaaatgactcttttttaggccaattttgatttcttttgggaaataattctctgaatacttttgtcgacttgtggtctttttgcttgcattcagttccttctgagtaaacaggtctaaagatttcttctagacatagttcctaaatcttctcatttatttgtttacctgtttgcatttaatggcccatcctttttccctccattttaatggtggttaccctgaggctagctaaaatcacaaactggagtcagaaggcaataccattaatttgatctttgcctgttagctggctgtatgttttggctgagaagtcttaatgagaggtacttaggaaaaatgtagagccttttaaatccttctgtttggggacaagtagtttgattttctaatcctgtatccttaaattactgtacttaatcagtttagattgtagaccatgttctctgaagtgacaggtattataggcacacagtctgccttccaagttatcaaaggcagtagttttactaaatattgtgacatgacataaaaaggatcattagttttccagactgcaatattggttttttcaccttgatctttactcagccacaaagccaagaaacatatttgacgttttaagtttttattttggcagtaaatcaattctggttacctatcccaaaatataataccttaaataagaattttttttctttttatgtgatggtatgtggagatagcacatggtccagacctttatgcatctcagctccatgagatcattcacagacttgtgttcttttcatcctgttgttctgcagcagtatttctcatgctcagaactattggcattttggggcagttaattctttgttataggtggctgtcatgtgcattacaggatgttcaacagtacccctcatctctacaggatgcccataggacatgctcagttgagacaaacaacatctgcagacattgcccagtgttcccctgggggcaaaatcacccctggttgagcatcattgctttatagttgcctaggatctcatcgtcatctgcatgatcaaagcagattttgatccataatgaagagaaaaatcaatcattcgaaatcactctagattttataattggcagacaaaaacattaatactgtaactttattccatatgttcaaaaaaataagtaaagaaatgcaagatatttaaaaagaaccaaattaaactttaagagataaaaattacaatgtctgatagaactaagaaatacattgaataggatgaagggcagatgggacattgcagaagaaaagattagtgaacttgaaaacatagcaattgaaactattcaaaattcaatacaaagaaaaagcaaatttaaaaaaaggcagaaaggagcatcagtgagctgtgaaatccttcaaaaggcctaatgaatgtgtaattggaggacctgaaggaaaggatgggagtgaatggtgggcaaaaagcacttgaagaaataatggctgatatttttccaaatttgatgaaaatttttccaaatttgatgaaaattatagacccaagaagtttagtgaattccaagcaaaagaaatatgaagaaaactacatcaaggcgtgttatgatgaaattgctcaaaaccagtgataaaggtaaaatcttaaaaagcatccaaaggaaaaaagataatatgtgtaaagaaacaaagaaaagtatatcagcagatttctccttagaaacagtgccagcaataagacagtgggaccacatgttaaaaatactaagcaaaacaaaacaaatgcaaaaatgtctctcaaaaactaagatgaaatgcttttatagacatacaaaagctaaaagaattcatcactaggagatctggattactgaaaatgttaaaggaagtcctaaggaagaagcaaaataatacttcacagaaatatgaatctgctctatgcaaaagaattggggagcgtggcaaatggtacctatgtgggtaaaaatgtaataagagtacaattctgtattcttcaggtcctttctttgcttatcactttggtgggtttctcttcctctgtagctttcaacaataagtccttgaaccttctgcattttttttttaagtcagagtctcacactgtcaccgaggctggagtgtaatggcgtgatctcagctcactgcaatctccacctcctgggttcaagcgattctcctgcctcagcctcccgagtagctggaattacaggtgcctgccaccatgcccggctaattttttgtatttttagtagagatggggtttcactatgttggccaggcttgtctcaaactcctgaccttgtgatccacccaccttagcctcccaaagtgctgggattacaggagtgagccactgcacccggccaccttctgcatttttatattgcattattgcctttggagaagtcgtaaatacacttttcaaaaaaagtaatttctaatttttgtcctaacccaacttccaatttaataactgtagtgattctatataaaatcttcagtgggccaggcaacttgtgtacagcacaacttcagggataccattcccatagactatgattgcacatctgtacatcatgtttctgattataacactgcattcaccttttcactctcccatcaaaagtatttgagttgaacttgagtactgtttcctaaaaacatctttatctcatatatcatctccccttttctttgtataatactgagccttcctagcccttatgttgtggcttaaaccccaccttctttaaaggatgattctaaactctttctgcccaaaatgaacatctactgtgattataccatgtgtcattcattatgacaccaaaatgccatcttgttgttatttagatgttttgtatgtgtatgtcttgtcttgaattcttcaattaaactgtttattttttaaagacagtgtgaggctgtttatcccctaggagagcaagtgaagttctgcatgttcagcaagcatccctaatcccagaattgatgcataaagtagcaaaaggccaaaggattattaaccttatgttttttccagttgttctatttaagcaaactacaccccatctaaaacaaggtttgaagtagtttggacttttccctaaagatttgatttctgcttggttttgaagttttgtattagaaagaaatcatactaacccttacttcatttgattaatatttgttaattgtttatatggtaaatacaggtctcttcacatagattatgtatactgaactcctttcttttgaatacaaaagccccatatttcccaaatttagtttttatttaaacaatcatatcctggatcacctgaggtcaggagtttgagaccagcctgaccaacatggtgaaactccatctctactaaaaatacaaaaattagcttggtgtggtgggaggcacctgtaaaaccagctacttgggaggctgaggcaggagaattgcttgagcccaggagggggagattgcagtgagccgagatagtgccactgcattccagcctgggaaacaagagtgaaactccatcttacaataaataaataaataaataaataaataaataaataaataaataaataaattaaataagccctaattaaaatttccctcagtattaccagtgttgggtatggcctcacattgtttccatcctgcttttcccatatttaataggccctcactgactcctgaatattgaaaattgagttcaaatacatagtttattcctcgaaatcctccctccatactctgctcagatggatgattccaacctcaccatggatctctgctctacctaaactggaagtggactcaagattagccacacataccttacgcttgcctgctttctgtctgggaataggcttcctccagccttcctaaatctcatgtttttcaagtctagctcctatctaacccctgatcatcagttaccttcctctatttttacattatcatcctaaatagagataactcacagggaatactgttgtattatagtttacttgctaaagtacatgcttttgatatatatatatatttttattatactttaagttctagggtacatgtgcacaacgtgcaggtttgttacatatgtatacatgtgccatgttggtgtgctgcacccattaactcgtcatttacattaggtatatctcctaatgctatccctcccccccacccccccaccccacaacagtccccggtgtgtgatgttccccttcttgtgtccaagtgttctcattgttcaattcccacctgtgagtgagaacatgcggtgtttggttttttgttcttgcgacagtttgctgagaatgatggtttccaatttcatccatgtccctacaaaggacatgaactcatcctttttatggctgcatagtattccatggtgtatatgtgccacattttcttaatgcagtctatcattgttggacatttgggttggttccaagtctttgctattgtgagtagtaccgcaataaacatacatgtgcatgtatccttatagcagcatgatttatattcctttgggtatatacccagtaatgggatggctgggtcaaatggtatttctagttctagatccctgaggaatcgccacactgacttccacaatggttgaactagtttacagtcccaccaacactgtaaaaatgttcctatttctccacatcctctccagcacctgttgtttcctgactttttaatgatcgccattctaactggtgtgagatgatatctcattgtggttttgatttgtatttctctgatggccagtgatgatgagcattttttcatgtgtctgttggctacataaatgtcttcttttgagaagtgtctcttcatatccttcacccactttttgatggggctgtttttttcttgtaaatttgtttgagttctttgtagattctggatattagtcctgtgtcagatgagtagattgcaaaaattttctcccattctgtaggttgcctgttcactctgatggtggtttcttttgctgtgcagaagctctttagtttaattagatcccatctgtcaattttggcttttgttgccattgcttttggtgttttagacatgaagtccttgcccatgcttatgtcctgaatggtattggctaggttttcttctatggtttttatggttttaggtctaatatttaagtctttaatccatcttgaattaatttttgtataaggtataaggaagggatccagtttcaggtttctacatatggctagccagttttcccagcaccatttgttaaatgggaatcctttccccatttcttgtttttctcaggtttgtcaaagatcagatggttgtagatgtgtggtcttatttctaagggctctgttctgttccattggtctgtatctctgttttggtaccagtaccatgctgttttggttactgtagccttgtaatataatttgaagtaaggtagcgtgatgcctccagctttgttcttttggcttaggattgacttggcgatgcgggctcttttttggttgcatatgaactttaaagtagttttttccaattctgtgaagaaagtcattggtagcttgatggggatggcactgaatctataaattaccttgggcagtatggccattttcatgatattgattcttcctatccctgagcatggaatgttcctccattcgtttgtgccctcttttatttcattgagcagtggtttgcagttctccttgaagaggtccttcacatcccttgtaagttggattcctaggtattttattctctttgaagcaattgtgaatgggaattcactcatgatttggctctctgtttgtctgttattggtgtataagaatacttgtgatttttgtacattgattttgtatcctgagactttgctgaagttgcttatcagcttaaggagattttgggctgagacgatggggttttctagatatacagtcatgtcatctgcaaacagggacctgctttacttaaatgctgtgtaaagaatttggtggaagctctttgaaatttttcttcatttgttactcttctctggaggagctctgcatttccgcatgggatgtcagtttgcatcacagtagagaatggacattttgtgggtaccgtggattgagctagtggtattgagagacaggactaagctggatttcctaggccgactaagaattcctaaacctagctgtggacggtgaccacacccacctttaaacacggggcttgtaactcagctcacacctgaccaatcaggtagtaaagagggctcactaaaatgcaaattaggctaaaaacaggaggcaaagaagtagtcaaatcatctatcatctgagagcacagggtgagggacaatgattgggatataaaccccaggcattccggagctgggatcgggcaaccccctttgggtcccctcccattgtatgggagctctgttttcactctattaaatcttgcaactgcacactcttttggtccatgtttgttctggctggagctgagcttttgctcaccgttcatcactgctgaatgctaccatcgcagacccaccgttgacttccagccctctggatcctgcagggtgtccgctgcactcctgatctagtgaggcgcccattgcccctcctgatggggctaaaggctcgccattgttcctgcgtggctaaatgcccaggtttgtcctattctagccaaacactagtcgctgggttcaacggttctattccgtgactcacggcttctaatagagctataacaccgcatggcccaaggttccattccttggaatctgtgaggccaagaaccccaggccggagaacaaaaggcttcctaccatgttgggagcagccgtcaccatcttgggagctctaagaacaaagacccaccctgcccccgccgcccgtaacagtatgagggagtaccagataagaaatctaaatacattcctaggtcttcctgagctagttcttttttgtaatgacttcattattcaagttaatgcctaatacctaagagatattcaaatagaattgcgacaacttactcaaatctgtattcatcttcaatttgaaattagtactgccattctctgttgataattgagaggttactgaacatctttgcatctttgatatgttttcttcttcttcttcttttttttttttttttttttgagatggagcctcactctgccgccaggctggagtgcagtggcgtgatcccaggtcactgcaacctccacctcccgagttcaagtgattctcctgcctcagtctccctagtggctgggactacaggcgcatgccaccatgcctagctaattttttttatctttactagagaaggggtttcaccatattggccaggatggtctccatctcatgacctcatgatcctcccgcctcgccctcctagagtgctgagattacaggccgtgagtttttcttcttcttcttctttttttttttttttttttttttttttgagacagagtctggcttgtcacccaggctggagtgcagtggtgcgatctcggctcgctacaagctccgcctcccgggttcaggccattctcccgcctcagcctcccgagtagctgggactacaggcacccgccatcacgcccggccaattttttgtatttttagtagtgacggagtttcaccgtgttagccaggatggtcttgatcttctgacctcgtgatccgcccacctcggctcccgaaagtgctgggattacaggcttgagccaccgcgcctggactcagtttttcttcttttatttggataactatagatttacctacttattctctattcttccttctctttagtgctctgttgtcaatttattatatttatcttatctcagatttcttttctttcttttatatgaccagtgtgcaatccctcctatattgtggtgggaggtgggagaggtttaccccagcaagcgtgggactggtagtggaaacatcttctacccagacatggtaatgttttattttgtaaaggttgagttgagtagatgaactgaaggaggtaattgagacaagtgtgggccatcaagcaagactggcctgaggggcatgtcaggaatcggagttcaaagccaagaatagaccaaactgcaggaaagcaaaagcaaaatcaaaatgagtgtaaaggaaggcagcctagaaatgggggtaagggtagtgtgtggagagcaacgtgggtgtttacctggtactaggcttttacatgttctacaagcccttgcatggttgaggaagctccattttgaagaatcagtattggagcagaagccaccagtcagtttcttcttgattattaaatcataagcaactcctccttaaataaaaagtaatgaaagatggcatattttaaataggacccattgtattctcagtagcatttaaatgaaaaggtatgttttgggggtgagaatatactacagtatttcacaatacaatatttccatatgagtgattttattttatttttttatttttgtttttatttttgagacagagtttcactcttgttgcccaggctggagtacaatggcgcaatctcggctcactgcaacctctgcctgccgggttcaagcaattctcctgcctcagcctcctgagtagctgggattacaggcatgcgccgccaatcacaactaattttgtatttttagtagagacagggtttcactgtgttggccaggctggtctcaaactcctgacctcagatgatccacccatttcagcctcccaaagtgctgggattacaggcgtgagccactgcactcaccctgagtgattttaaaatagagaattgtcttgttctgagattaaggttagcttatcgttcagctactgtttcagtaaaataaataattccagtaaaggaacgataattgtagttatcttggcttggtatattatgctatggttaggcaattttagagtaaagagaagaaatcaaaagctcttgcttagcacacttgctgcttaggcattcttgttggaaaataatgcgttctcatttcagagcaaagacagcaaagctgactctggtatttggagagctaaaggagtgaaacttcttttaagaacgggaccattcgagccctgtaggagcttttgagcatgcgtattcaactgctcactctcatgtctataacccacgctgcttctccaccgttatgtgcagaccataagccctacagtggtgacagctgcttttaggcccctttgccttaaatacagtagaatgcttatatattagacttttagttcttgaattttggctagatatttcaactttcatttaaatgttgtaacatcccatgatcagagcattataacctggagtatcactgataggaaagaaatagtaaaaaaaagtatgtaaatatgtaaatgtaaacataaatggaaatttgaactcagttatttgactaatgtgtgtataccatctggctaactccatttcaaacaccttatgcatttacttgtagtttttatcttctctaaatataataacttgtagaggaggagtgtggaagagtcttccatttaccaaagtgatttctgtgtcattttcttgagtttgatttcagtcttgtgactggtaaattctaagtatctgcccttttgagcaaataaacttgtcaatcagatattttctaaaggggatattttttgttaatattagtttaggttcatgtggacattgtttaaaaagctttgggaactttaatgattggattttataacactttattagttatagccaactatgttactacttccatcaacacccatactctgtttctttgtgaaatgaaaaatattgttttatttgacactctcctccttattatattgtacacagtaaaatccaaacggaagccaataacttctgaactctaattgtgtccatcctgtaaagcatatgggtttgttcactgattcacttccagagaactaggtcatcatcatgagaacccccacattccccaaatcaaatttacatgttcttgaaggaacaccaaatggtaatgagtactttgctaaataacgttgacctttatttattttcttatggattttatgctgctttactatgtgtcagtatccctcccttcttttagaaatccataaacattgcacttgctttcattttgaactttcttcttactaatttagacattaaataaaagagacatatatgcttattatcccctagtttaatatatatattttaaaaagttaagctgatattttaattttatttcttcacgtgagcatcatttattcatttgttcatttactcaatatgtatttaaatgatctctgaccacagtgactaaaaactgttgggtactagaggtgcgaaaatgaatatgttgtgtggttaatctcagagtttcactgggaagtaggggagacagacgtgcctacaaataattgtcgtagaagagttgttattgtagggtcataaatgggacaggatgcaaaggcagaggagggaagtaatgacagggatgacttgaaagagaaagtgaggctggacatagtggctcacacctgtaatcccagcactttgggaggccgaggtgggtggatcacctgaggtcaggagttccagaccagcctggccaacatggtgaaaccctgtctctactaaaaaaacaaaaatgaaccgggcgtggtggtgtgtgcctgtaatcccagctacttgggaggctgaggcaggagaatcgcttgaacctgggaggtggagattgcagtgagctgacattgcaccattgcactctggcctgggtgacagagcaagactctgtgtcaaaaaaaaaaaaaaaaaaataagagaaagtgacatctgactcttgaaagattagcaagacaaaacaaggaatgatgttttaggcaacaagaacaatatatgtagataagaaaagcataatttttaaaaagcatatttgggaaataatgagaagtttcatgaggacattgggcatgaggggtcaaggtgacagatgcaattggaaaggtaggatagatctagcttgtctgaaggatgtcttgtgctttgaacctgtggaccagaggatatggatactttcagacaattgcatgatcaaatgttttgttttaggaagataatttggaggcgaaaagactgaaatgtgaaggtactggtaatacatatggagaatagttaggatactattagaatagtctgggggagaaataatgaaggcttctttaaccaaggctgcaacaataggggtgtagaggggcaaactgagcagcatttcccaggtactgtagggaacttgggtacagttggatatgtgagacaacgaatagtgagtcattactatcctccacttttcttttatcttccttttaaaaacttccctgtcctggtctctctttaattttaaggaaaagagctgctaaaatgtgtgctttatagagaaagaagcttactagaccttacatgttctcacttatggcatttagtgataaccagggtgtccctaagcaattgaatagtgataccagaccagcttctgcatggtacagctttaatgtattattgtttgaacttcattaataattagacttgcgacgaaagtaaccagttcaagtgatcttataatcaactttgtgcctcagcacctggaactttgagagagccactgtgttcatttatcaggaggcattctgcttcctctgtggtgtgccattccctgacttggtaaagaatattgtctctctggcagttttgtattagtgagttatacaaaggaggtcatagcaaaccacctgtactttagaaagttaacacagaaacactgaagaggtatttcttctttgtggtacttcttatattcaagcttggctctatttccgtagcacaccagtccaggctctcattttctcacattcgattgactacaagagctttctgacttgtctaccttcagtctcttcctctcttaagctgtcctgccctctgctattagattaatctttctaaaaggtaatcttcgtagcattcctcacctacttgttgtccagtacccatctttttggaattccattttcatcataatttggcctcagatgtacttactggcctcaaatgtacctattggacacattgggatgaagtcttgttctgttgcccaggctggagtgcaatggcatgatctcggcttactggaacctccatctcccaggttccagtgatcctcgtgcctcagcctcctgtgtagctggaatcacaggcgtgcaccaccacaactggctaatttttttgtatttttagtagagatagggtttcaccatgttgcctaggctgttctcgaactcctgagctcaggccatcctctctcttcagccacccaaagtgctgggggttcaggtgtgagccactgcagtcagcctgttttatgcttttaagtttcttctctttcctgaagtagttgactgttacataacatgtattatccaaagttcacaggatactctaaataccaatattatgatatccttatttttaaatatagaaacctttctcctcttaccaaaaaccacagtgactcagctacttgcatgtctaaaatggtctctgcatttttctgtggctagtctttatgatggttatagatcagtaatagcctttttggaagcataatattatgtattaatcatggcattcttaaggaatcactgcaattaaccaggtagaccaatttagttggaccgtggtctgtttttttagtatgtaaaaacatgggttcaggggattaaaacaactcaacattcatgaagaatatattttcagatgctcttacattccctgatttttcaatactgctacgatttttttttacagagtttctttacttatgaaattgatataaaataactgccttgtcataagaatgtataataactgagaagggcaaagactgtaagctaaatttactcagcatctgctacatgggagtgactcagttcattgctcagcaaacccacaagttactgtgttgtgtctctgtggggtctcctggggagaacagaaacaataaatgttaaatctgtaaatgtgtcaaggggtcactgtggttgactcttggttgctaaaggaaacagaggttctaaggccctgtaaaattataatatttcaaagtgaaaatgaatgaattaatagaagaagctgagacaaggatcttattttgtgtttgttttcctctcaatacccttgccaattaacattttttgaatctcttgctcttctccactgtaagcctgccctgatattttctaattggatacagagataatacataactggccaggtgtggtggctcatgacagtaatcttggcactttgggaggctgaggtgtgcagagcactggaggccaggagttcaagaccagcctggccaacatagtgaaaccccatctctactaaaaatacaaaaaaattagctggctgtggtggctcacacctgtggttccagctgcacaggaggctgagacacgaggataactgaaacctgggaagcagaggttgcagtgagccgagatcatgccactgcattccagtctgggagacagagcaagactttgtctcaaaaaaaaaaaagagaatacgtaacaaagaagtaagaaaacaatttcaagtggtgataaatgtcataaaagaaataatacaaattttttactgcccttcattagataaagatagtaagagagaaggcctctgggccgggcacggtggctaatgcctgtaatcctagcactttgggaggccaaggtgggtagatcacctgaggtcaggagttcgagaccagcctgaccaacatggtgaaaccccgtctctactaaaaatacaaaattagccaggcatgatggctggctatttttgaatgccagtaatcctagctactcagtaggcggagtcaggagaatcgcttgaacccaggaggcagaggttgcagtgagccaagattgcgctattgcactctagcctgggcgacaaaagtgaaaaaaaaaaagaaaagagaaagcctctgtgagcaaaatgacattggaattgaatgatgcagtagagctagccatatgaagattggcggcaaaaacggtgcagaggcccttctgaaattctgctgcatctatttgaagccatgagtgtgtgtgtgtgtgtgtgggcagggggcggggggtatgtgtttatgtatggtgggagagctagagtgggaggaggctgtgcaatctattaccacctttgtttcacaacatggacttgtccatttcaagaaaaaaaaaatgaggctgagcgtggtggcttacacctgtaatcccagcactttgggaggctgaggtgggtggatcacttgaggtcaggagttcgagaccagcctggccaacatggtgaaaccccgtctctactaaaaatacaaaaattagcctggcgtgctggcacgtgcctgtaatctcagctacttgggaggctgagacaggagaattgcttgaacccaggaggcagaggttgcagtgagccaagatcgtgccattgcactccagcctgggtgaagaagagagactccatctcaaaaaaaaaaaaagaaaaaaaaatgaatgtccctatcttgacatattaattttgtagaaataaattcacttgctaatacatgggttggcccatataactcctccattgaaaatattattttttacagtgacagctgttaaacatatacctaacattctatgtaatatgaagatgaagatgttagagattgcaaatttaatagggaattggagatggaccataggaagaaggtagagacaattcacaacttactaggatgagtacaacacctcattattttttaacagcaatgacaatacacacacataaagataaaaaaatgctggtctagcttgagaggatcagggaatagtctagattctatacacgataattttaatctgatcaattcaaaatttaaaaacaggcttctgctaacatatgtttataccttctgcttaagcttgaaaataaatatgagctttatccacactgtccaggaaaggggatgaacgaactgagatagcattccattttcaagcctgtgccactaacatggcttcaagaaagcagctcttacagagacgctgtggctgagctgccaaggatgtagctccttgaactgttcatctggaaaagaaagtgcttatcagttaaaaattgagaaggcagatgtgctttattataacaactgtgtgtttagaagtgacagttctcagggcagacttgtggataccccttctcaactcaacctaagaatcttagattctttcttaccagatggcaggctcaggttcctgaccagttccacgtggaataaagtggtgaagcataatctttctaataagataggttctttatgggatacattacttgaaagaccagattacagtgcaggaaatgctaggttccctgccgtgcatctgtgctctgaatatcttggcttcctgactctgcctctgacaagttttatgatgatgagcagtcacttatctactgcctcagtcttttcaacaggataaacatgttagaccttggtgttttctagggtccaacaaggtttcattactttattattctgttatatctagagtatctgtttcagtttgggcagccctatgagagatactgtccaaagtgtgttcttgaagtagcaagcatgattgtgaatagtctagaatggtccagaaaccacctcataggagacccagtttgcagcagggatgattagcttagagaaaagaaaattaagactgtctttgaatattttaattaacgtcacgtggaaaaaaagaagtagacttagtctgtgttgctgtaaaatatttaattgaggtgactcttataggaagtgctctaaccacaaaaggaaaaacaaaacaaagggaacaggaggaaatttttagagatgatggataagtttacggcactgatagtgataatggtttcacaagtgtatacttatggcaaagtacatcaaattatacatataaaatatctacaactttctgtatgtcagccatactcaataaagcaactaaaactatatataactgagcctagttactagaagtttcagatgtctggcttactatgtacagtatagccctttcctaaatgtccagtaataagataagcagcctattgagctacatgtcaataatgacacagaagtagaaacaggccagtgcggtggctcacgcctataatcctagcactttgggaagccaaggcgggtggatcatctgaggtcaggagttcgagaccagcctgaccaacatggtgaaaccccgtctctactgaaaatacaaaattagcagggtgtggtggcgagcacctgtaatcccggctacttgggaggctgaggcaggagaatcacttgaactcaggaggcagaggttgcagtgagccaagattatgccactgcactccagcctggttaacaagagcgaaactccatctccaaaaaaaaagaaaaaaagaaaaagataaagaaaaaccaagtagaaacaaaatgactctctacagaccataagacattcttacattaataaaggcattacagtagaatctgatcacaaggattggcaataggtattagtgatgctaccaagactattcagaatgttattaaattgcttttggtaggggaaagttctcctttctatttaaaaacaaaaaaccttctttaacagttatgccttaaattttacaaggttagagcattcctaaaaagctaggtaagtctacaatattttacagagatgctataaacatgtgacctcaaccacctaccaaaatgtcaggtaactgcacagtatcttctatattgtactctaattcttcgatgtttgagttccaactataaaataatgagactcatttccctgtgatacaacttgtaagctcagtctcattacatttcattttagcttttaagtagcttgaataatccttaaagttagaaagcagcatctgatctgtctttctatatccagaagcatatagtacagtgttgagcaaaatcaagacttttttttttttgagatggattttcactgtgtcacccaggctggagtgcagtgtcatgatcttggctcactgcaacctctgcctcccaggttcaagtgattctcctgcttcagcctctccagtagctgggattacaggtatgcaaccaccacacccagctaatttttgtatttttagtagagacaggtttatgatatgttggccaggttggtctcaaactcctgacctcaagcgatccgcccacctcggcctcccaaagtgctgcgattacaggtgtgagccaccatgcccggcccagaatcaagacttgaatgaaagaaagagtgtgatttgtgcaggattttacactaccacgatggcaccactactcactgtgtcatctgtattttgacctgtttgctggatcttaggaacttgcaaaatcattgaaggttcatctttttaaaaattgtcaatcaggcaaagaatagctagagaattaggttttgctctcctagtcaagaagggcatggatcctttgctacttattgatgtgtctgtgtcttagtgaaccgaagaggcaggtgatctgacaggaatgtcttttcagtgtttgactaactctctttctattgtgaatatatccaaagttctttttgtctttctaaaccctaacccagataaacgcaatgtatttttacacattttcttttcttctatgtgatttcctggaaagaatgaaaaaaactactagttgttgagcacctaccatgtgctaggctctacgagaggttcctttatatgcattaatttattaaattttcagagcagctttgccagctaggtgatgttgccatacagaagctcagagggctaagtaacttattcatgtcatacagctagtaaatgtgactaaaagatgatgtaataagcaatgccctgttttggtcttagagatatatttaattatcattactcttggatttttgtctaggcccatcccagtagtataaacccacttttgtctgcatctactgtggacaacaaagacatacctacctcatagcacacagtgtgtcaccccttttatagtgtccatcacaccctactttatctttgtatttggatacctccctgattttaagctcctgcaggtcagaaggtgtttcctttttcatttttgtaactactgaaataactacctagcatgttttgttacattcagttttcttaattataggtccatgaattaagtcaaatgtgcttttcattttacaatggaaatctatatgtgtcctgaatatgtctgataaccatgacacagtggagtggttcaggaagagcattctcaagtgcaaggctctaactgggattgcagcactgaccacctgcttccagtactccagagaatgacacttctagtcattagaccatggctttgggaccattgcctggttttttctcttactctctcttattgggtatgaaaggattcagaatatgtcacccctcccccccagtatatcactgtggcataaggattattttgaggtaaaggcgattaaggaaaagcagacataggacaagctctctgccatcccccgtatgcctgaaagtcaagcataaattcctcttgtgaaggtgcctcgccactcactttccataccagcaaagggatagcaaccttataaatggagaggagatggcaccaagaaagagtctatacaaacaaaccttattaactagtctttatctgtcataagtttccccatatatttgccttcctacaatttgtcaccctaggagctcaaagtccttttcctttgttttatcacttctctacagaagtattgttccttattaacatgctaataaaccccaagtcccaagtttttgtttttctgagacagggtctcactttctcaccaaggctggagtgtagtggcacaatagtggctcattgcagccttggctttccaggctcaagtgatcctcccacttcagcctcctggttagctcagactacaggtgtgtgccaccatgattaattattgttgttattattataattatttatagagacaaggtttttgccatgttgctcaggctggtcttgaactcctgggctcaagccatctgcctgccttggcgtcccaaagtcctgggattataggtgtgagctactgtgcctggcctcagccccaagtactaaccactcctttgagttagtcattactgagtttctcccatgtgtgtgcatactacatgtgttaataaagttctgtttatgtttatcttgctaacctgtattgtctcagacttatttgcagggccccaggcagagaacctaggaggatagagggaataagtttttcttctctatgggtgattcatccaaaagaaatgtgagaaatcatgcattattaactagttaaatcggaagagtttcttttctcttattccattttatggactactttataactcagaaatgttttctgtgaagtgttctgttgggtacatgcttataatcccagctactcagtaggctgaggtaggagatcccttgagcccaggagttcaagatcagcctgggtaacacagcaagacgccatttcaaaagaagaatgttctgtgattgttctgtgatttattactgaatcgcaacaacaataaaaaaagtatttgggatttggggaggaagaggaggaaaagctcactgaaatgagtgatgcttttagggcttcaaaaatccctagaatctcttttttcatttcaccaagtagtgttctagaagaatcattttacctgatattgatgaacattctattctgaaagaatatcctgaaaaaaggaccagggcagaaatgatggaaattttgaatgcaaggatttttgaggggaagcatgaaggaaacatgagggatttttgatggggaaactgaagtacatgaccacttgttgtagtgccttgtacacagcattttgttaaacatacctaactgttttaagtgaaacttggtttgctcattaagataacatattttgctgggcacggtggctcacacctgtaatcccagcactttgggaggccgagacgggtagatcatgaggtcaggagttgaagaccagcctggccaacatggtgaaaccccatctctactcaaaatacaaaagttagccgggcatggtggcacatgcttgtaattccagctactcgtggggctgaggcagcagaatggcttgaacctgggaggcggaggttgcaatgagctgagatcacgccactgcattccagcctgggcaacagagcgagactctgtctcaaaaaaaaaaaatcatattttaattattacatttaatacatagtatatatgattttaacttctttttgtgagcatcagagccaaaccatacagttccaaaatcattttgattaatttttacttatttttactggaatctttttgggcaagtcctgtttctggtttatgtaagaaaaaatgcttcagctagtacttttcaagaccaagttagttgagtggaaacatcttccctaccctttaaaaagtcaactagaaaaaaatcctataacctaagaagtcactgaattcttcattcacatttaagagcaattcaggatgttcccttgttcttaaatgtgaaatgtctatggcagtgctgtacatagcagtagcacagtcctatcaaacaaaatttaatgcagaacaccagtatatatacaaggtaaaaatggagctgaggggagtgtgtgtgtgtctaaatgtgcgtggtgttgggggggtgtgtgtgtgtggtgtgtgggatgtgtgtgtagggggtgtgtgtgtggtgtgtctgtgggtgtgtgcaggagggtgtggggggtgtgatgtgtgggggtgtatgtggtggtgtgtgggcgtgtagtgtggagtgggagtgtgggtgtgtgggggggtgtgtggggagtgtgtgtgtggtgtggggtatggggaggtgtggggggatgtgtgtgtgtgtgtggggtgtggtgtgtggtgtgtgggtgtgggtgtgtgtgtgtgtttagggatacagtatgaaaggcccagaaccttttccttcttatggcctccctcttccagctgaacctatcctcatcctaggcagtacatcaaacatttactccagaactttaggacctgaaatttatttgtatatacgtaatattctatgcttatgatcattttacattaagatctttactttgcatagttttttgtttttgtttttagagatggggttccactatgttgcccaggttagagtgtagtggctgttcacaggcaggaacgtagcacattagagcctggaactcctgagctcaaaggatcctcccacctcagcctctggagtagctgggaatacaggcacacactactgttcctagctctactttatttagtttgttaagaaatcattttagcactttgggaggccgaggcaggcggatcacaaggtcaggagatcgagaccatcctggctaacacggtgaaaccccatctctactaaaaatacaaaaaaaaaaaaaaaaaatagctgggtgtggtggcgggcgcttgtagtcccagctactcgggaggctgagacaggagaatgatgtgaacccgggaggcagagcttgcagctgagatgctgccactgcactccagcctgggtgacagagcgacaatccgtttcaaacaaaaaaaaaaagaaatcatttttggaagagataaaaggcttgacagcaatatataaatatttcatttaaaataacttgttaaataatacttaaatgttaaatttcttaaaattcttgtttttctgagattttggaaaaacaaaaccaaataatatattgttaagggaggcagaatctcccttcctatttctttaagctcattttcataattaatctatttatttaggcctacagacatacatcaataaatatgtttctatttggttatttgtagatatgtaactcttatttgtcagagtagaaaactaagactcacaaaatacatgctctggctctcttagccttgtttctctttgtaccatgctataatttgtatggagaaaccagcctggtacttaagagagcaactacagaaccacagaatcaagatgctgaatatggattagttaattgttaggataaagttaagagactgtccctatggtgatttggtcattttgccttcatttggctacaactgattatttattcacaacaagtaaactaatataacacattagcactaagattgtaaaattttgaactatggataatttttatattactggggaaggattaatttgaccagagatttatcagaacaatgttttcaactattagctgagtgtttatcaaggtctgtggcatacaaaagttatttttgctttgagaatttcaattctaatagttctttaaatgtatactcttaatacgtgttaggtttttattatttatcatattgcttgtttacaaaaatcttccttttaatcatggccagccttcccagaatcctgaaatgcttcttgtatttgcattgcaaagagtcattattattgcataaacacttcaacttgagggtgtgtcatttcttggttgcttggtctttggctcttctgtccatactctatcattttaccctaatacctctcttctgtagcggtttcagtcatctaataaggattggaacatcccactttaaatccaagtataagatctattctcgttgttagaaagcaagagtgaataaaggtcagctgttcagatgactggctgtctgatttttttctgtgagcgtcacatgttaggaaaagctagttcatctctctgtggcttaggattcaacagcataagctgtcagactaacactgattgaaggtagactgggagggggaagcgcatctgtccaatggctcgccattggcttcttattacagcattctcccctgagacacactctgcatgctcattcacctacctcctcctcttccctccccttccttccctaccccttcattactgattcacagcgagaggcagcagcagcagcagtagcagcagcagcagcaacaacagcgctgcttgtcacgaatcgaggattgcaatgagctcatcgttttctccttgcagcttcacaactgccctggcttcctggctactgctgctgctgtcttctcacacatagacacgcacacacaccctttctcgcacacacacacacacacacacacacacacacacacacacacacacacactctcacacattctcacatgctagacccttctaagcagcttgtccgtttttacacatgtatctgaactctcctgcatcactcttggccattttctcgcattcgattgcttttgccgttttttatttagatcagtacttgatttcattttcattttccagtctactttggggttctcgcagtggataatttagccaaaatgtttttcttgtggagacattagctgacaattcccaccacagactggcttgtacgtcctcccagggagacctaaacctggctcccctcccaccgcagttcttaatattgtggataagagatccatctttctcattctggatacctacttagtgctcatggaagaaggggtgccctgcccagccccagctgctaagctcacacctcctgtcaaaaagtcccaggacatgcacgacgagaggagcaagctggtgaatgagtatgcgtgtcgagtgctggaacttctggggatggggcatcgtctgtttgtgcctcggcttctggcggtgagattgtttttcattgaacttcatttgtagggaatctgctatcctctgtgaaaattccttgtatctctgaaagaggcttgttgtctctggttttcttctccttctccccattctgccgagaaggaaatgctgagtggccactgttgtgcagctcatttggagcctggtccacaccaccccttaattggttagaggagatcatggctcttttctcagagcccagggtcacattagtggcattatctctgtggcagcaaaaaaatggttttctgcctggctaggctcagcaataaagcagaatacccaagtgcttgatgtaggcattctgttatgtatatctccaaagggttaaattttacaacagacatagcaacttatctagactgtgtgtggtttgctttctaacctccccattagattgccaatttgattgttgttttgttttgttttttgatagagaattttaccacctaaaaatactttggtaggaaattttaggtttctctcctagaatgattgaactgtttatctgtgaaacagcttaaagctgctggcttctgtgctgtgaatctgggaagtctgacttgcttgttatttgatttcctgaataagagaaaaatcacccttcctcatttcctaccaagggttaaaattaaatacccacaatcgctgttgcaggcttgagaactatacctagcaactattctataaggtaattggtttacagtagtcctataccattatgtggtaatggaataagaataatttagccttgtctgttttatagaatggagtttaataccattttagactatttcctcactatggttctctcatattagagtcttttcagtacagtatttacatgactgaatttaactcttttctctcctatatctcccttcactataattcatctctatttatacttatctttacaattactagttcagtctttatgtatgtatttacatgcaaatataatctcttctgtacaatcataacagacatgttagatagccatgtaaataagaaatttcccatcctaaggaaagtctatttgtcattccaaaacaaagtttgatgcagtgactagcatacaattataggggggatatttttgagaaatgtagttcctttgtcatttaaagaagaaataaaaagagctgaagacatgtgttttaatgtccaggtgaagtcattacttccctgaacctcatctttttcttaaaggagaaaactaaggattcatgattctatttagaaaggagttttgttttgttttgttttgttttgtaagtgaaatgagaagcattttatttcaggagttttgatattgtgaagtgctaaactatatttcaacaaattctctacatctctgaggaatcaggcttggtctaatatatttctgcatcctaaagactactcaactttgtgactcaaaggcttccaatggtaactttccagtaatttggtgccacctctctttggcatttacattttcagtgttttgaaggaaaacataaattggtaattaagaatattttgcatactcaactctgcattagggatgaatttaaactgcctctagtctgaaaaaattaattagcaataaaatccacagggagttgggttctcaagcttgagctctttggaggtcatgtatatctgtgtattgcaattgtaccaactctggttggttgccaaattaggcatctgaagtagtgcatctctcaggtggtcttgagaccttacttaggctctatcagttagagcctaagtaataatgccacctgcattatgtgtgaaaagcatatgctaggccagatgcagtggctcaagcctgtatacccagcactttgggaggctgaggcgggcagatcacctgaggttgggagtttgagaccagcctgaccaacaatggagaaaccccatctctactaaaaatacaaaattagccgggcgtggtggcacgtgcctttaatcccagttatttgggaggctgagacaggagaattgcttgaatccgggaggcagagattgcggtgagctgagatcgtgccattgcactccagcctgggcaataagagctaaactccatctcaaaaagaaaaagaaaagcatacgctgatttatcttgggggccacttgaaaatctctggctttgttttacacagttgcacttgaaaaattattggtaatacgagggtactctacattttgggaaattacaagttctttaattagcaatatggctgttagttgggctctgctattcagtaagttactgctcaaagtttagcatgtgtaccagggggaaattgttcagccttgtgttattgaactggctaatgatgtgggatcaatggctaatctgcacaggacactcctaagaggaatcctgccacatgcagtattgcaatcttttcatttctagtcaagaggaagtactaaagtgtaaaacatctctttacctttttagtcatgtttcaaacatgaatgcttgtgggttaagcacatacaagtactttattttacttttaagatcccattatttttttttcatcataaaaccagtcatttttcaaaaaaatcaaataaatgaagatttaccaagatagtgttgtggatttggtctctgagccttattacttattgttccctgattcacagagggatcgtcaaactactagaactctaggtttctttaaccttcagttggaaggaggttactgatataatagaggatgcacatttggaatttttgcttgttacccttcaaaggtacacccagttaaggacaattttcctttaataaatcaggtgcaagcatgtcattttagatattaccacaaggcctaaattctatgtgtacattcaccaaacatgtttttcttttgtgaaattaaaatactgaaacaggagatgcaaacatcctagacatcagctaactggtatttcccttttctaaagcctgtgctttcaaatgattctcagacctccagaaatttttagctgaataaaaattctgttagataccataactaaaggaaaaagaagccatttaggataaaaatagtgaagataagaaagagaatcacatttagattttttttttttcaaatagtcccctaaaagaatcaaacatagaatctgctgcttattagaggcccttaaagaaatatttattcaagaatagtgagaagtttggaatagaagcatctggagctaatactcaaacagtggaaatatttccacccaccctacctctttcaaaaaaaaaatcaggccaagcgcagtggctcacgcctgtaatcccagcatgttgggaggctgaggcaggcggatcacctgaggtcaggagttcaagaccagcctggcccacatggcaaaatcccatctctcctaaaaatacaaaaattagtcaggtgtgggggtgggcgcctgtaatcccagctactctgggaggctgaggcaggagaatcacttgaacccagaaggtgggatgcaccactgcactccagcctaggtgacagaatgagattccgtctaaaaaaaaaaaaattcaccttaaaatatgatactcttgcactgaatttttcagtgggaaaaacacattgaaaatggtatcagtggtggcatgtggccagagtccatactctgtaagtgtgtgatatttggagaaggaggagaaactttgactttgcttatattcaaaatctccccttttccctgcggatgttttttttttgtttgttttgttttgttttgttttttgtttttttttttgagatagggtttcagttacccaggctggagtgcagtggtgtgattttggctcactgcaacctccgcctcccaggctcaggcaatcctcccacctcatcctcctgagcagctgggactacaggcgcccaccaccatgcctggcttatttttgtattttttgtagaactgaggtttcatctcatctctacaaaactggaaaggctgttcttcacctgggaaattcttgccaacgctggtctaaaactcctgagctcaagcgatctctccagcttggccttccaaagtgttgggattacaggtgtgaaccaccgtgcccggcctccctcgggatttttaattttgctactatatgccataagaagttatcagatcattttatgttaaaattagtgttatctggagtttgaatacagctactcattttccacagtgaatcgaaggagggttgattatacatacacaaatgatctagctgtcccttttcgtagccattttaaggtttcattttggtcaaagtacttatgctgataaattgcatcctaatcttgtttgtttttaactttgtagactttcttaaacattaagtttaaggaaggatgaaagagcagaggagaatatgtcttccctttttacctctgttgttaacagctgcaaggattgctctttaaagagaggttacaacttataacagaagttaaaaacccaaatgcagaagttgccatgtatacttctgataccccccaaaaaatctaaaaatcaatttttatatgaaaataagtcctaaatacactccataatttccattgtatacatcttaacttttgaatattggatatgcttgaagtggagccttaataaattcatggaacaaatttatgtcgatatctattatgtgtcaggcaatttgcttaattcatatcactggggtaagtgcaaaggatacttacattaacattctacttacctttccctctggatatttcttcctacctacttgaaagggaaaagaagtaggacttgtttaaatgactttacttttatctttttatatagttctatgcaaatgaagaaagaagtaatgtcacctttgaaatgtaattggtaaacatggttcatattatttaaaaggatttgtcagaaagctcagggagcaaaagacggttgtgtagtagagccactaatttcaaaaagttatcctttattagttcttattttattttatttttggagacaaagtctcgttctgttgcccaggctggagtgcagtggcatgatctcggttcactgcaacctccatctcctgggttcttgcaattctcctgcctcagcctcccaagtagctgagactacaggtgcgtgccaccacgcccagctaatttttgtatttttagtagagatggggttttgccatgttggttaggctggttttgaacacctgacctcaagtgattcactctcctcggcttcccaaagtgctgggattacaggtgtaagccactgcgcccggcctattagttcttatttaaaagctggtagagttattttctttattttccaagggaaggaaacatgcctctgcttattgaaattgtcgaaatcttattcgtattatcttctggctaacattacttaactaatgttgggaaaggagttgcattttcattattttactcttccctcgccattgttctgaaagcaatatagaaaagctctaacaatttcccagttgaagaacagcctttccagtttaaatcagtttttctagcctgaagggattttgttcagtgagcacagatgtataattgtaaaccagaagccagcacaacctattttgggtacttggtttggtttttgaagtgttagtctgccttttaggggtacatttttaaagcatagatcttatgatcgcaagatcattcgttaagcctcttcattgtcagggtaagggtttagtattcatacaattataaactcaattatgagcactaattatctgcagagccagctcattaataattagtatgtgtgcaggcatggtagctcactcctgtaatcttagctactaggaagactgaggcaggagaatggcttgaggccaggagttaaaaaccaatctgggcaacatagcaaaaccccatctgtaaaagaaacaaacaaaaaaacaaatttgccaggtgtggtggtgcatgcctgtagtccaagctactaggaaggctgagacaggaggattgcttaagcccaggagtttgaggctctagtgagctatgattgtgctaccgcacttcagactggatgacagagcaagaccctgcctctaaaaaagtaacaacaataataacaataattagtgctaggatggtgagatagtagcactaggatggtgagaactggttctggagccctggttgacaccatgttttattttcataaacagcactactacttgtattttagactaattacattacattaatgcttgacattcataaagcttatttatttatttattttgagacaaggtctcactctgtcacctaggctggagtacagtggtgcaatatcagctcactgcagcctccatgtcccaggttcaagcaattctcctgcctcagcctccagaatatctgggattacaggcgtgtgccactacgcccggctaatttttgtatttttagtagatacagggtttcaccatgttgaccaggctggtctcgaactcctgacctcaaagtgatccgcccaccttggcctcccaaaatgctgagattacaggtgtaagccaccatgcctggcctgtaaagcatatatatttaacaaaataatatgtataggtgattcaaattttgttaaatatgtgtaagatatgtatgtaatgatggggtaaaggactataaataatgtaataaaatattaattatgtttatctctgtagtcagaccttatattaggcttttaaaaaattttttattttgggccatgaatatgtaatcaagaaaaagtttatgaccccaccatgtagacaatacacatacatatgtacgaattatgattgaaaaagtattcttttaaaaaaaaagccaaacaacttttgataaattcttagtgaaacatccaaatctttgcagaacaagaaaacatccaatctttgccgagcaagaagtgtctatcccttgattgtagagggaaaaacctcttagatacagttgtcagcaaatgaagagttatctctgtaagcttataatctgcttatggcattacaaaggcatttgaggtaatacttaatgattatggaagtctctcgaagatagaaaattggaggaaaaaacccatcagaatcaaagtaggactaactacaggttgtcttctagaatactggcagcaaggtttttgttttatgtgttttgtgcttactggcatttttgttttcgttcacaatgaaattagctgtattgcagcccataagaaaaatataagttcttccaacttagactgcccactttatggaattaaaaatatcagtgaggccaggcacagtggttcacatctgtaatcccaacactttgggaggcctgggtgggaggactgcttaaggccaggagtttgagaccagcctgtgcaacgtagcgagacccccatctctaccaaaaacaaaacaaaacaacaacaacaacaacaacaacaaattcttttttttttttttttttgagatggagtctcactgtattgcccaggctggagtgcagtgcagtggcgcgatctcggcccactgcaagctccgcctcctgggttcatgccattctcctgcctcagcctccccagtagctgggactacaggcacccatcaccatgcccggctaaaattttttttgtatttttagtagagatggggtttcaccgtgttagccaggatggtctcaatctcctgatctcgtgatctgcccgtctcagcctcccaaagtactgggattacaggcatgagctaccgtgcccagccaaaaaagaattcttaaaacgtagctggcatggtggcacacgcatgtagtcctggctactcgggagcctaagatgggaaggtttcttgagcccaggagttcgaggctgcagtgagctatgattgcaccatcgtactccagcctgggcaacaaattgaggccctgtctcaaaaaacaaacaaaaaattcagtgagagcaaggtactgcttttagccactaagatatctatttttgagcatatttgagcaacacagatgctatcaccccttatatttcttttggaattcaaaaaatgcactcttataccttaaattatttcattctcaaatacttgtttttttggtgtgtgtgtgtgttggtttttctttctttcttttttttttttgagacagagtttcactcttgttgcccaggctggagtgcaatggtgcagtctcggctctctgcaacctccacctcctggattcaagcgattctcctgcctcagcctcccaagtagctgggattacaggcatgcgccaccacgcctggctaattttttttatatttttagtagagatggagtttcaccgtgttggtcaggctgatctggaacccctgacctcaagtgatccacccgcctcggcctcccaaagtactgggaatacaggtatgagccaccaagcacggcctcattctcaaatacttgtgattaaagatattcccattttttaaatgggaaaacttacatagcactacaagtttgccaaagttgaagttaaaatgaatttattacatcctttgcaaccctgagtacctttaatgtgtcaagtactccagaggctgaggttagcaaattgaataagatgcagttttcacacctttgtatacttgagcctccctgccccatggttgccagatctcttctcttcttgagcttaactgagctgggcaatccatgtgatttgcagcaatatcaacaccaacaatgtctaggaaaggacagccacagggaactctggcttctcgtgtccagagacttaacctgagttaggcttcagccccaccctggtgggaaccccattgctgtaccctccctgaggctattagcctctcttaagcagcatctctgcctacatggccatccctgcttgactagaggtccggtgtgtgagaatgtaggattcctcattcttgataccaatctatctgcttttgtatgtgctaaaaggctggatttgaaattaggccttggcaatattagaaaattagataactatgctactgtctgcagagaagagatcgcccatcaccattttggggcatctgtttccaggtaactagaggttaattgcattgaaaatagaagaggtgccttcagaggactttcggtagtgaggaaagggttaatcctgtttctccacaaaccctggaagcagtttgtctggaattgtccaaaccactaccagagagctaatcatcagaactggtattacatgtgaaaaacgaagcctagggatgtgtggtacatctggtagaattggtagctggatgctttcccccataattcagccgttgatattttagttagagaggctctctctcagactgaagttgtttccagtaactgccttttccagctaagttaaggtgagttgagagcatgctaagcattctccaccacttgttgctattgcatctgtatgtttatgaggaaagagaaatctgagatgtactggagttttttgttttttcattaccactgttagcctagctccattttttgattactaatttgtggacctttgtgaaactgcctggtatgaatatgttcttttctttcacatttctgtttaaagggcaggggaaaagggaagcaaactctagcaaaagagagatgaaagtagatttcattcatttattctgttagaaatttgagtgcctcctatattctgggcattgttcttgttgctgtggatgtagcagtgtgaaagacagacaaagaggggaagaaggggagcagatataaaactggaaagtgaattggtggggaatgggctaggaggaagaatttaagtgctcagagaaggtctcactcagatcttatattgagctaaaatctagattacaagatgttgctaggattggactacatgtcttgctagtcatgataatgacttggaccagggtggtgatgacgaaaactgagaccctgttacaagcaggaatttctctggcttcctgcctactttttcagtgcagtctttaatcagctttacattttaatttaaataaagtaatattttgacacagcatgtagttatgtgatttctgggtgcttttttaattgttgaagtttttgactattaagtactgactgtaaaacatctaatttgtttttggcttctgtgtactcatcttcctaaatctataatatgtatcacagtgtttgccaaagttgtttatagctgtttattaaaatatttattgtctttcttattataaaagcgttatacagaaagtataacaaaatgtaatgaaaaaaataaccttcaggttacagtgacccatgcctgtaatcccagcactttgggaggctgaggtgggaagataccctgagcccaggagttatcagcttgggcaacagagtgagactcccatctctatttaaaaaaaaaaaaattataagtagctgggtgtggtggtgtgtgcctgtagttccatctactcaggaggctgaggcgggaggatcacttgagcctgggaggttgaggttgcagggagccatgattgcactatgcactcccgcctgggcaacaggagaccttgtctcaaaaaaagtaaaaataagtggtataacccatgattccactatacagataaacattttgttttctttttagtcttttttctgtgcacagatatatttatttccaaatggttttttagtttttgaagaagtaaatttggtaaacaatagttttcagaagagatcagtagttaggtggtttgtttcatttactttttcatagcattcttcaaggtatgggatcaatttcctattcttttcacttgaactgctgctgtcattagttgaaaagccatcttcccattaggtgtttattgtgtaactgatgtattttggttgcattttctatgtcttcagccagctttttaataatatccttaaaatgttcattgagctgaagtcacagattagtcctagagtccagtttcttttccttttttagccttattcttttctcagagctgtaacttggtaagctttgccaggaaccatcattctaattttcaggtaatatgaattcagtatgttagtttgttcattaactcttagattgcttctgtgatttatggtgatttatttcagcttatagtaacatcatctaaatattgaaatgttagaaatatcttcttaaaatgtttggaactaacttagatcttagctataaaagtatattcaagaaaatataaattctttttgaaatatatttgtcctcaaagcaggctgaaatgtaatgacgattcttgatgattattttgcagacctcaaaggaagaccttctgcaggctgattttgaaggtgctttaaagttctttagagttcagcttccaaagagatacagggcagaggaaaatgcaagaagactgatggagcaggcttgcaatattaaagtaagaacatgagtttttatataataaaggtaaaatatgagtgcagaataatatgacaaattatgtaaaaatttttttatatgttgcaaggtttgattatgtttaagattagattgtgtatgaactgatttctcccagatgtgtttgtcaggctaatgtgtgtatagtagctgtaccttctagtaggacttaaagttggcaggctcagattataacaataggaagataaacatttatctcataggtggggctctagagtgggctgctgtgatagtggtttccatggaagcagacttagtatttagcttttgccatctgttttaagattatttaggacaaagcaagaaaagcttgcttaggcaatgctttcatttctctaagtgacttggaaagtttgagtcttgatctgcccattcccatcccacacctgccaaatatctgtggatacattggtccatgtcacatgtctgataaagctaaacacattttataaatcaatttgaaattgaaaactctttccagaaagttgtagtattaaggtgagagagcactcttaaaatatttggaaccaatttactgatgttaattcttatacctctacaatataccagggtatctttttacctaaccataacgtaaatataaattgttttcctaaacaaacagagatcctggtcttagggactttacattcttgcagaaggaaacagacaataagcaacataataaatacattatttatttaacatgttagaaagtgataaatagctgtgaaaaaaaagagagtaggggaagataaagggaggttggattagtgggggagcaaaggttatgattgttattagatagtcaatgtggacctcactgagtcaatgaaggagatgagagattagtcatggagatgtcctggggaaaagctttctaggcagagtcaatagccagttcaaaggtccagagactgcctcatgcctgggtgggcttgagaaacaggaaggccagtgcagctggagtgaagtgaatgaaatgggagtagtaggaatgctcacaaagagccagaaaatgtaggccattgtaagcatttaggctttactttgagtgaagcagggagctcttgcagggtttttagtggagcaatgatatgatctgtctgaggtttttaaaggatcacaatggctattttgttaaaaacaaccataggaaggtaagagaagtagggacatcaaacaggagattttggagtaatcctcttgagagatgatgatagactgaaccagggtgttaacagtggagatagagatggagtggagatggagatggttggaacctgagtatttttgaaagagaaccaataagatttcctgatatattaaatgtgagtgtgaggagaaaagaagagttaaaatgattgcactgattttgaactacgcaactaggagataagagtcaccatcaacttattaagcatattacttaaaaggtactttgacacagacttcttttaggcaccagagccactgtaacattttttggtataacacaatctttttaaatttaaatcaaattataaatgttaaaaagtacagttaaaaagtacactgaaagtaagtaactgggcagaaaaaaattattttgtctttcaagtgagctttatattcaaagagatcattttccaaagctatcataagaaagatggatttctgaagttttcattctgaaatgcaaactctttaaagccttcacgactgattgttttatttggccaaagtgtaagccacatttatttgtaactttgaaagtatactctagtgggcatgatgcctttgactgaattttgtgggtggtgagtttgaaaggtaggcttcagccaactgattgtttcggagatgccagagagaagtattgtaaattgggtcaatgttgtaggcatcctttaaaataaaatatttatttctaagaataaaagagtagagaaataagaggtacaggtaaggtgaaaagttaaaggttttcaagggaaatctcagaggattgccaagtcactgaggacaaaagaaacccaggaaaacaattgaaaaacatgaaatgtatagggaaaatttttttctccaatataatttatgaagttcctggaggtggctagttattatcaatccagaaacatgggatctgagagatggagaagcgtaaaatgttagaaaacaagttcaaaatataatccaaatggactgctcctggaagggaagtgctgggtacaaccagaataaattttttggacatgaataggtaaatatgaatatttttaaagcttttaataagatttcaataatttaaaatttttaataatttaataatttgtaaagttttaatagttttttgtggggttttctttgcattatctaaggagaatgcctttttcttggatatttaagacggtatccacgggacaccatttcatttataacatataattgtagagtgaatgattgtgaggcagatgtgaggtgaaactgaaagaaggaagacataagtcatccagtattgggctgggattgtgctgggactagaatgtaggtctccaatccaaaggtctaaaattgtttttaaaccaagacctatattttggttgcttttatgtcaagaccatgactatatgtacgtacttacatacacataactgaagagatacttacccttacactgaggcactctgatgttttttgttctattgtattgtatttccttttttttttttgaaatggagtctcattctgttgcccaggctggagtgcagtggcacaatctctgctcactgcaacctcccaggttcaagcaattctcctgcctcagcctcctgagtagctgggactacagtcatgtgccaccacgcctggctatttttgtatttttagtagagacagggtttcaccatgttggccaggctggtctcgaactcctgaccccaagtaatccgtccgtctcagcttcccaaagtgctgggattacaggtgtgagccaccattgcccaacctattgtattgtattgtattgtattttaaacttctccccggatcccaagaaaatccccaaaccaaaaggctgaccacaacccactaaatcgattttacaatagcttgtagttttgaaaaaacactaagacctatcccactgttcctaccacctccccgttccccactctgatctgccacaacccatgagaggctgtagatgacgaggtgttacaatgaataatggaagtgcatgtgtaggtaaggatgtgagtcatcatgccatcattacagcagcttgtgctggcagttggaaattttaggagatgatggacttatagactgagacttatgtgttagacaaagcattcatggacaaaggtgactgcaggcatggaataggcaagaaagtttaactccttatccatagcctatttaagattaaagatagaatttctgccaaaagtaatcaagttttaaacatttttaaattattttcaaagttggtgttgtatatagttgtgtcttttttgaatggacatgttcccatttaattaccccccaaaataatcactttcctttaattttaaggaactgtaaccagtgatttcagtgaaactgaaactggctttaaaatagatgcagcagttgcaagcaaaaaataacttgttagctctgtatgtggtttatttctgtgagtgtaccaacaagatttgttaataaagcacattagattggataaataattttatttttccaaaacttgtatgacattaaatatcaggaacattttcaatagcttctaaactggtaatttaactaatgtgactccaagttattctaatacccttctgttcctatggtttcaactaggccaaaatcagaaaacatattgacccatcaggctttactttgaacagtcatttggttacttttaatattgaaatcaagacctaaataaaagatgtttaaagtgcctaatatgaatatcctgtattttcccagggagtcagtttttattaaatatcatactttgatttttgccttatagttaaaaatgctgccattgcagagcttcttaaacttggattttggcttcagagactctgaattaccagaaatttgaatttctttgtatgaacatatgagcattttgtttttcttagtaacataatacatagcttttttttttttttttttttttgagatagagttttgctcttgttgcccaggctggagtgcaatggtgccatctcagctcactgcaacctccgcctcccggattcaagcaattctcctgcttcagcctcccgagtagctgggattataggcatgcaccaccacgcccagataatgttctatttttagtagagatggggtttctccatcaggctagtctcatactcccgacctcaggttatccaccccccttggccacccaaagtgttaggattacaggcgtgagccaccacaccaggcctcgtaatatatagctttattaagtgcatatacacataatctttataattcttgatctgattacctgtttttctacatatttttattcaataccatttatattgtatcaggttgaattgatgaaattaccattcctgttggtcagaaactgtcaggtatttgattggtttatgatttatgattcagtattttatgcctccttacagctcaaataggtgcatatgtagcttagctctatggccatgtaaacttttcctgagaattattctccaaaggctaagaaacaagtcttttttttttttttttgagatggagtcttgctctgtcaccaggctggaatgcaatggcgcgatccctgcctcctgcaaccttcgcctccctggttcaagcagttcccctgcccagccttccgagtagctgggactacaggcgtgcgccaccatgcctggctaattttttgtgttttagtagattcagggtttcaccatgttggccaggatagtctcgatctcctgatctcatgatccacccaccttggcttcccaaagtactgggattacaggcgtgagccactgcactcggtcagtcctttttttttgttttgttttgtttttaagttgatttttatttggaataatgttccaagtaccatatttacgatggacttcagtagtagcaaagttcataagcacaatcatccaaaattttctgttggtagagctttataatagagctttttaaaatatgttagtttatttcacttgtatttcattagtaaaataatttgagcaaaattaaaaggcaaaatctgacattaacctaaaggaagaaaattaggaaagaaaagttatttattgagtgcctgttgtgtcccaggaactatgccaagaggacttttcagaggaagtaagagttaaaatgaaatctgaaagattattaggagttaaggagtgtatcaaggcagggagaaggatgtttcatgcagacaatatgcagaagcccataggtaaaaaaaatatggagttgcccaagacctgaatgtaggtcatgactggagagtaggttgcaaggagggagaggcagttaggggagtagatagagaaaagactagagaggtaagcaggagccagccagcttgtgcagagccttgtaaaccacggtaagcaatttggattttatcctgaggggagtgataagcactgaaggatttaaaataggagacataaattatcaggttattgttaggaaggtcattctggttgctgtgtgggaatggattgaaagggttaagattcggtattggtgacagaccatttcaggagctgttgcagtcatctaggtgagaagagaccagagtttttgtaataggctgaagaaattatggatgaattccagagacattcaagacataaaattaacagattttagtgattacatgtgagcctcagggcagataaagagagccagcgatagcacttaggattcttacttaagcaacttggtggaaatcacactgagaaaggaaacaaacaagagaacaaattataagcactaaagataatgagttaacttttgaatatgttgttcgtggtacatatccacaactcatatccaagtagatataaatatccaataggcaggtggatactgaagtgagatctgagctaaaagtagacatttgggagtcatcagcattgaaaccatgggagtgggtgaattcttatagcggagtatatacaatgagcagagagaagggtggaggatagatgcattcacatgtaaaatacagatgagggaatagaagctggtgagactagaaggcaggaagaaacccagaagagtatgactgtgaacactaagggaaaaggtgtttgttttcaagaaggaaggagttgaacaagtgtcagtggtacctagaggtcatgtataaggtactgagaagtggaaagtagctattgtgcaatatttaacgaaaagacatccttaatggtcttaatgaaagtagtttcagttaagttatgacaaataaaagccaatgattcaaggaataaatagcaggtgagtaaatagagaaatgaagatgagactgtttttctaagaaggttagtatggggagaggatggaaaatggaagagatagccggtaattggactgagcatggtggctcacacctgtaatcccaacactttgggaggcggaggtaggaggatcacctgaagtcaggagtttgagagcagcctgggcaacgaagtgagaccccatctctacaaaatatttgaaaaggctgggtgtgatggctcacacctgtaatcccagcactttgggaggctgagacaggtggatcacttgagcccaggagtttaagaccagcctgggcaacatggtgaaaccccgtctctaccagtaaaaaagaaaaaaaaaaattagccaggcatggtgacatgtgtctgtagtttcagctactcaggaggctgagatgggaggattttttgagcttgggaggcatgggttgcagtgagctaagatcatgccactgcactccagcctgggtgacaagagtgagaccctgtctcaaaaaaactccaaaaattatctgggcatggtggcacatgccgggagtcctagctacttgattggctgaagtggaaggttggcttgagcccaggagttggaggctgcagtgagctatgactgtgtcattgcattccagcccaggtgacagagcaagactctgcctgtctctaaaaaaaaaaaaaaaaaaaaaaaaaagagatagtcagcaagcctgagagtaagtatgggagagagagagatgagtaagtacaagagagagagataagaggatgttgagactaagatggatttttggaggatgggaaagatgagtctttaatgctaaaaaaatttccaatgactcttaatttcttctttgagcacctactatatgccaggcattgtaccagatagacccagggaatatgagattgagcaaaagcacatatgctctcagagctcatggaattcacagtgttaatttaatcaccttaataaatgtatacttacagagtgagataaatgttcagaagagatataataaagatatatgagagcaaagagcaaaggaacctgaccttgactcaatgatctagagaaagcattcttgaactgagattacaaggtattccagactgaaaagcagcatatgcaaagcctgtgaagagggagagaatatagtaagttgtagaaactaggagaaggccagtttgactgtacttcagagaatgatgacagttgatatccagggaccaaaccacttcatctaccaataagaaggaaaagcccacagaaagagaaaagttaaagattaaataaagaaagggaaatatattaacaggaaaaggactctgaggaggtaagggattaacctcaaaagaatggacctttcattacaagctggagggaataggcaagggaaggatggggaaaatggtgaatgtgtagtttggtgaggaagaaattgaggatatttcatttgaagttttctattgtttctgttaaacaggatctaggatgaagggaatgcagtaaagtgacagctttgagaaacatggaagagcttttagactggaaaaactcaaaagaacagctagtctatattgttgtagactatgagttcatagtggcaaaaatctacagtgttttgtaattttctttagaaacatttagtagtccaaatgtatatatgaagaagacagaaggttattttaaccacagttgaggtttgccaatatgaggcaaaggaaggacatggggccagggcagttgtgctaataaactgtatattgggttggggagtaagagggagtagagaaagaggtatccctgatttgtagcgtttgcccatttccatggtatgaatactcccaccatggccaaatttcaagctaccaatgacttaaccgccccactcaatttctgaatattaagagccacttttgagctggtagtttctgacactggtacaccacagggttgaggagatgaggctaatagcaggagagtggttgacatgatgggaaatggagtctaattaatagaaaagagagtgaagatagatgggactgaaagactacaagaaaagggcctgggagaagggaacaaagaattattggactcaggaagaatggcggaagaggagattaattcccttattgggggttacccaagataaaaagcatctttttctcaaaaattcatatattttaaagagaactttctgatactagaaagtaatattgccctgggctcgcccctgtaatcttagcaccttgggaggctgaggcgggcagatcgcctgagctcagggcttcaagatgagcctggccaacatggtgaaaacccgtatctactaaaatacaaaaatttccctaggcatggtggcacgtgcctataatcctagctactcaggaggctgaggcgtgggaattgctggagtccgggaggtggaggttgcagtgaactgacattgcaccactgcactccagcctgggcgacagagtgagactccatctcaaaaagaaaaaaaaaaaaaaactgccctgtgctcataatttccagtgatcgcagcaaaaccatgccaattactattttggcattcatggccacctcctatgatttacttctctttgtcctaataattctgccaccatcactaccattttactctgatcacatgattaagagttggaaatgcattgtgggaggaatagacaaagatggcagaggcagtgcaggtagcgggaatgagggaatgaggaagggcactcatggttaaaaacagaatcctgacccagcatcttctcacacaccaaaattgtcttcctaccccgtgctaaagaggtagctaccaatgataagatgttacttatcacctacttgcctcagaaaattctaagctctgctccagctcaattacctatatattgtgctggactattttctactctcccaaagttgcaaatacaatttgatcttacccctcacaaatcatgtttttaatgagacagtggtagattcctttatctagaatttaattttttttctccgaagacctccatattcataactggatttgaatgtttttgaaaataactttcacagtagagcaaaactgtaaagaacaattgcattaaaagcaatttacctctaatttcttcatgctgtttgctatttattcctggctgttgttgctgtacgtgaacaagaatgtactctctgaaatagaggctttctttgaattagcactgaggtcctacagaagtttttgtcaacttcatggatctaaaatgtgtgcttttatgtacaccattgaaaagattcacttttgattaaaacacatcttgtgttccttttctataaagacctctatatgttgacaaccacatttgagttgttaggtttagtgtcataatcttctgctggagaaatgttatcatgttataggatacagatgtgataattaacacattgataataaagctgggtgcggtggctcacgcctgtaatcccagccctttgggaggccgaggcgggtggatcacgaggtcaggagttggagaccaacctggccaacacagtgaaaccctgtctctactaaaaatacaaaaattagccgggcatggtggcgcacgcctgtagtcccagctactcgagaggctgaggcaggagaatcacttgaacctgggaggcggaagttgtggtgagcggagattgcaccgctgcactgcaagcctgggcaatggaacaagactgtgtctcaaacaaacaaaaaaaattgataatgaagtagtttctatatcaaagcatttgccactgtttgcctttgagacttctattaacactcatagtcttcagtgcaccttagattggggtattgttttgttttattcccagtgagcagggaacatgttaatgttggacatgttctgaaacagttgataacaggcagaggaaacaggtcagagctccagatgcttaggcatcaggcaccttccacatttaaaaaactcagcttttgtggcccttcctaatcagctagaacagtggtctcctaccagggatcattttcatggaagacaatttttccatggtggagggggagggcattagattctcatagacagagcagtctagatcccttgcatgtgcagttcacaatagggttcacgctcctatgaaaatctaatgctactgctgatcagacaggaggcagagctcaggccataatgcttgctctcccacgaggcacctctttctgtgtggcccggttcctaatgaccggtactggtccgctgcctggtggtagggacccctgagctagaacacatttgtcttctttatttgcttctgccattttgtttctaccctgtacctacttctgccagtcattttctggcagttcattaaaaagaaagccatacatacattttaaaattaacctgatgggtaaactaatggatataaaaattgatttatatttgggcaactcttttcttagaaaaacaaatagtaaaccataggaatagagcattatgcctttatagacgttccaaaattggaactatgtgcattccatgcataattaacaacaaaaagaacatcagaattgctatctcacctagtagtttatttttcttcaaaaactttaagttttctttttttccctgcacctaattcacgcccagcagtcttataatggatcaaaacctaatgattatgctcttaaataagagtttccatattttgtttacctttctgaagtgttttgccaattaccttttatccagtagttgtgatttatatctatcagagttgccataacgttagaacttgtcttcactattgggaacagcagtaatcaataattttcccgcaaccatttaccgtgattctacatttctttgaattattttatttatttattatcacttgaattcatattaacattatgtttaaagtgtgcttcatgatttgtatttggggatccgatttacagaagaaaagaaaacattcctctgaacccttgttgcttctcactggaaataatttcattatgttaggcaacaataaaaataaatgaagagaggttggttaatgagcacacaagcatacactttgatagaaggaataagttatagtattcagtagcacatcagggtgactatagttaataatttattgtgtacttcaaaatagaagattcaaaaggttcccaacaaaaagaattgacacatgtttgaggtgatcgatatcctagtactctgatgtaatcattacacatagcattcagggagcaaaatatcgcatgttctccataaatatgtacaattattatgtatcagtaaaaataaattagaaattggctgggtaagtggctcatgcctgtaatacttgcctttgcctcccaatactttgggatactttgccgatcacttgaggtcaggaatttgaaaccagctttaccaacatggtgaaatcctgtctctactaaaaatacaaaatttaggccaggcgcagtggctcacacctgtaatcatagcacttcgggaagccaaggtgggtggatcacctaaggtcaggagttcgagaccagcttggccaacagggtgaaaccccgtctctactaaaaatacaaaacttagccaggtgtggtgacacgtgcctgtaatcccagctactagggaggctggggcaagagagtctcttgaaccaggaaggcagaggttgcagtgagctgagttcgctccacttccctccagcctgggcgaaagagtaaaactccatctcaaaaaaaatatatagatatagatatatacatatctatatatatattagtacaaaaattagctgggcatggtgacacacgcctatagtcccagctacttgggaggctgaggcaggagagtcacttgaacccaggagggggaggtttcagtgagctgagatcgtgccactgcactctggcctgggcgacagagcaagactctgtctctaaataaataagaaataaacttaaatgaaacttaggtgtttcagataagttacattaggaaggttgggccattggatcctgagggtttagtgttctaaacacttaaagcacaactgttttagataccaatgcctgtactctggggaatataaaatataattatattagatttactgagtaatttttcatattttcatttctccaactcagatccatttaccttgcaaataactaaatctaattaatattctggagaaattgcttatttcactcttgggcctttttctctcctcctctctcccctactgttcctaaaaaaaaattttttttttgaaatggtggcagcaacatgtaaatgaccatagcaaccaaaaaaagcgaaatattttaaatgttgttcacatatctccaactgttgtttgtcaagccttctgaagttccacttaaagacaacaaactactgaggagaaaattatattccttgctgtagttaatagttgtgatcaaatgggcattcttttctcattgccaaaccctctgacttggggattttgttacttcaacctgtgagaggaacagagctattgctttcatctagaacatctaccttttgccttttttcttagcctgaggcacttcctacccaaatcattactgtatatgtagttaatatagtctcttttaaatactcattattggttttgcttttttgatttttataatgtgaaggaatcttggagtacaaacgacataaagaggtggtaaaacagtgttctgatagtagtttaggctaggagaagcgtcacgttctcattgtggcacaagttcaacagatttatcagtgtgttagcctttccaggcactgccttattctgttatccctaacccgtagagtcaccatactttctactaactcttgctacttttatcctgaaaagttttagctgaagtttcttacaaaattggttcctgaagaggtcatacttttgtttctgtttctcatgtctgctgttttacatctgcattcattttctagggatgccctaacaaaataaatacacactggaaggattctttactcaacttttattttagaatcgagggtgtggccaggcatggtggctcacacctgtaatcccagcactttgggaggccaaggtggtggatcacttgaggccaggagtttgagaccagcctggccaaaatggcaaaaccccatctctactaaagatacaaaattagctgggtgtggtggcgcatgcctgtaatcccagctgtaatcccaactcgggaggctgaggcaggagaatcgcttgaacccaggaggcagaggttacagtgactggagatggtgccgctgctctccagcctgggcgacagagcaaaactctgtctcaaaacaaacaaacaaacaaaaaaagaatcaagggtacaggtgcaggtttgtcacatgaatatattgcgagatgctgaggcttggagtacaaaggaatctctcacccagatagtgagcttggtgcgcaacaggtggtttttcagctcttggctacttcctgcctccctcaaatagtcctgagtatctgttgttcccatctctatgtccaggtgtactcaatgtttagctcccacttataagtaaaacatgcagtatttggttttctgtttgtgcattagtttgcttaggataatgacctccagttgcatccacgttgctgcagaaaaggtgatttcagttttctttttttctttttttggagacagagtttcactctcattgcccaggctggagtgcaatggtgcgatcttccctcacgcctctcgggttcaagtgattctcctgcctcagcctcctgaatagctgggaatacaggtgtgtgccaccatcctcagctaatttttgtattattagtagagatggggtttcaccatgttggccaggctgctcttgaactcctgacctcaggtaatccacctgcctcggcctctgaaagtgctgagattacaagcgtgagccaccacgcccggccaccacattttctttatccagtccaccgttgataggcacctgcttgattctaagtctttgctgttatgaatagctttgtggtgaacatacaggtacatgtgtctttttggtagaacaatttattttcctctgcgtgtatacccagtaatgggattgctggttcaaatagtaattcaacatttctttgataaatctctaatctgttcaccgcagtggctagagtaatttacattcccaccaacaatgtataagcattcccttttctctgcggcctcgccaacatcttattttttgacattttaacaaaagccattctgactggtgtgacatggtatctcattgtggttttgatttgcatttctctgatgattagtgatgatgagcatttcttcatatgtgtttaggctggttggatgcatagactgggaggcttaaacaacagaaatttgctttctcacagttctgaaggttagaagtccaagatcaagatgttggcagggttgatttcttttgaggcctctcttcttggtttccacatgggatggtcaccatctcattgtatcctcacatgattattcctctgtctatattatctgtgtcctaatctctctctgtctttgtttttttttaagagatggtgtctcaccatgttgcccagactggtgtgcagtggctagtcacaggtgtgattatagctcactgcaatcttgaactactgggctcaaacgatcctcatggcttagcctcctactgagtagcaaggactataggcatgtgccactgtgcccagctctaatctctttttataaggacaccagtcatattggattagagcccaccctaaggacccattttaacttaattgtctctttaaaggccttatctcccaatacagatactggaggtactgggagttaggatttcaacatattaattgggggggcacaattcaccccataacagtgttgttctcatagtaactgagtgcgcatttcttctcaatttctctgaaaacattctcttctgaacgtgaatcttgcttggcagctctgagctatacctccaatatcttataacacgtgacagtttcctatttttgtcagcatacccaacatcacccattttctcctaaactctcagatgatctaaaagatcctatttttttttacagctccaccctccacttctatcagcccacttggttggcaaggaattttctctggcatgcatgatagcttgttagaagttctaatttaccttacataccctgttctagtatggtcttgttgcattaactttcttataatcctgcttttatattgtatcctatgttatgcagaccataacctgccttattcctctcttttcctgaaagagaggcagtgaattgtgcaagtaagttgtatctttgcacaatgtccagtggtagaagaaagtctatattgtattataatagagtattttaagcaacaacatatgttgaatactatataggacacaggtacttagtttactttctagaattatttacataaaaacttttgtccctaaattttgacccaattttaggatggccattatttaagaagccagatggcagacattgcttctgtgaaggaaacattttgaagattgtctgacatagtaggatcttcttagagccatcagaatttgcagtttcaggttcctgacattgcttgtctggagtgctataactgtctcataactggtctctccggctttggtttctgtcccctctagtttcctctgcatgcgaccatttgagttgtctgtctggaaaactaacctcagtttatcactcctcagaggacactgaagctccctgttacctgcaagacaatcccacacacctcaggttggcacacttccctttcactcataccaatatgccatggccttgtcacatcctgtttctgctgcctaggttgctttctgtctgtggagtgcctggagaaggcagaggctttgggagtggacaagtctaggtttgaattctggctccagttcttactgagtgatcctgagaaagttacttgatctccttcgagtatgagtttcctcatcgtgaaacaaggctaatacctactgcacagagatgttgtaagaattaattaaattaaacacatgtgtgaagcattggctaaattaattccttgttgtagctatgtagtcaagcaaactcctatttaccctttaggttgcaggtcaaacatcacctgctctggaaacctaggctgttatttattctgactctggcaattcctacactagagcaccactgttggcgttaagaacgtggttttctgaagccacattgttggagtttaaatttagccttttccatttaattagtagctgtttgatctctggcaagttacttattgtacctcagttatctcttctgtaaaatggagatcctattttctatgaaataggattgctatcaagattataaataggataatataaataagaaacttggcacaatgtagtccataattagtgtacaaccaagatagtcattatgactctagtttctctcattgtgaggtcctcaaggctgtgactcttccttgcccctccctagatgcctgaaccaacacctagcatagtagatgaatcaaggagtccatctactatttatttatatttattgaggtaacaaaccctgtttataaaagatgaagaatattgggctttgcattttccctgaaaatacttctggtaataaacaggaaaatcctcaaatgttacactgagtggtattccaggtttattcctatagaaaaatgaaataaaaagtgaaatctgtctgaattttgcttttaagagtggtgtttattatactgtgtagcttagagggctcatgcaatataaatttgtgaattttccaccattccagaccgttaagacttagatagaaggtcatcattcttccttgatgttgtggataaccagatgccctccctcatccctattagatttttttggattattatacagtgattttaggatactaaaagttttttcaagtttcatttgcataagtttcttagtcgtgtgtgatcaaaataactgtgttgaaagaattgaggctaagatgtatatgccacagactttaaaacagagtagaatgtcagattaaaagagtttatagtcaaaagattgctaatgtaattactaatgtaatataattactaatagatcacaaatgatagactagttatttccatctttatgtatgaagttataatcacattttatattttgatgtacaattttttatgcatttcataattatccatttattttcttcataaattcaaagactgtcatgagtatatctgcatatttatggttgcccattgtatcaattatctattgctgtataacaaaccatcccaaaacttacaggtttaaaacaacaatatttttcgtgattctgtgagttggctaggtggttcttctgttggtatctcctggattcactcatgtggtagcattcaactgttggaacagcttagaacagggcccctctttccccatgcttactcatgctcagcatcttcacaatactgtgatccatgttctcaagaaggcaagatccagtgcacaaacactttatcaagctgtttcaaacataccacaagggaaagggataccaggagtcatgactgattagaagccattcctgtaacaatctgccacattcatgcatggaaaatttgtgtttcagtacaaaaaaaaaaactagcttagtttctgaggagagagctgaaagtctggtgtggaaaggagacttccttcccattcaataaaatttgcttttactcgttaatactttttgtttaatttaatctatttatttttatttataatgtgatttaataatttccttttatataatttggtttttttttgccatgaggtgttatttttcttttttttcttttgaggcagagtctcactctatctcccaggctggagtgcagtggcacgatgtcggctcactgcaacctctgcctcccaggttcaagcgattctccttccttagcctcccaactagctgggactacaggcatgtgccaccatgcctggccaatttttgtatttttagtagagacaaggtttcatcatgttggccaggctggtctcgaactcctgacctcaggtgatctgcccacctcggcatcccaaagtgctgggattacaggcatgagctaccgcacctggtgagctgttatttttcaaacaaaacaaaaatacttcacaaaaccaatgaatgagtgaacctggcatcagtttagggtctctgatagcagaaacagtagatgattatgaattggtaataacatttgagtagagatactctgattacaaggagcatctaacctatgatactgattctatcatacatcagaaaggtgggtttccagagttcggaggaggctcagaattgtttcagttgtctacctcatggttattaataatttataggagatttgagggaaattttcaattttgtttatttaattttattttaatttgacaatactttggtatcttttggttgtgctggttcattgttctgttgaacaatgctaactctaaaaagaacgttttagacaacataaatcaatggaggaagagaatacatttgccaaaattaacatgaacactttcttaagaaaatagcacttgagaatattgcaattaaagactaagagagtactccgagtctcccaaagtacctacattcttagccaagatacagcagcagctgacctttaaattcatatattccaatttaaataggaagttaaagttgaatattacaattggtttttcagggtaaatgttgcccttttttcctgaggatgagtccaccttgtcttaaagaaaggacaactggcaattctttctctgacactgaccaattgaaaatatgagagaaccaaacaaaagctttccatataatatcaacctaactattcagtgttttgctatagacagactctttgattggccctagttaatctgttcttgttttaattcatctcaaggttcagcattagtcattttatcccaacagatataaccttagattctttctatggataatatatttagactcatcttaatgtaaatttttcatggaggttcatgggtagaacctctaggtgactaaaaaaaaactagctttatgtctagataaaacgctacaactttgttccttataaaataatcagacctgtatagtcagtgaaatatcacaagatccaaattctagtgacttaactttagattgatctaacacctaaggtaggagagtggagttgggggtaagcaaaggagaggagatcatgtaatacattctcagtatttggagaacaatgcggtggaaacaagaaagaatacaaaagaaaattcaaaagatctagtattttgtcttttgaaaaataagatccaggctaggtgcggtggttcatgcctataatcctagcactttgggaggccaaggcagacggatcacctgaggccaggagttcgagactagcctggccatcatagtgaaaccctgtctctacaaaaaatgcaaaaattagccaggtgtggtgtcaggcacctgtaatcccagctactcaggaggctgaggcaggagaatcgcttgaacccgggaggtggaggttgcagtgagccgagatcgtgccactacattccagcctgggcgatagagcaagactctatctcaaaaaagaaaaaagaaaaagaaaaagaaaaaagaaaaagaaaaggaaaagaaaaaagaggtccatgagtagagtactgcatttgtcaggaaaactactacattagacaaaacttgcctttaatgcctggagatacttgctgctgtcaaaaggtgcacaacttaattttgcctctttggctgatgttccccactattctagatgaactgcgcccaaaaacagatccaaagatatccttccccacagagagttggtgatggatcttaggaactaagtgctatgagcatgttgcaaaaggagatcacagacccagttcaggctccctccagcagccccttctcccatgacctctatgtcagttacatccatgtgctgacagtgggcacacccacagccactactggctaccttcctcctggctgtctctgtgtgttcatgacttttgctggcacatctgtagccccaggtccctttctccagcttgccactcctacatatttttcccttatgattctatgctgtttgccatttttgtttgaaagcagtgcattggttaacaataactttgtagtgatagcaaccaccatagcaataatgtcctgcttccttgtatgcctggcatgtttatcatttaatcatcacaacaccatgaagtaaatactcttattgacccaattctatagatcagaaaacaggcctagaatgtgtaagtccctaatgaaggctacttggctaataaatgacaaagccaaattttgaatccaggcagtatggtttcagagtctttgctttactacctcttttactcactatttttgtactaatcttacactttactacatattttctgaaggcagtcaaaatttaaaagttgattattactgccagtatttatcagtcgcataatgtatttatttttattttctgagacagggtgtcactccatcacctaggctagagtgtagtggtgtgatcacagctcactgcagcttcaacctcctaggttcaagagatcctctcatcacagctactggagtagctgggactacaggcgcatgccaccacaaccagctaatttgtgtgtgtgtgtgtgtgtgtgtgtgtgtgtgtatgtgtgtatgtgtgtgtgtgtatatatatatgtgtgtgtgtgtagagatatatatatatatatatagtagagacagggttctgtcatgttgcccaaactcctgggctcaagtgatccacctgcatcagcctcccaaagtgctaggattacaggcatgagccatcacacccagcccagtaacagaatttaagactactctagtgcagtatgatcatttacatggcatccactcattctttcacttaatctttaccacttattatgtacccactaggtcctagtactgcagtaggcactccattcagttatgatcataacagaaaatattcctatcctcctgaagctttcaggataatggaagggacagataacacaaaaataatataaaatcgcaagttgtgataaatgttacaaaaggaaacagaaagttgttttaagacagaaaatagtaggaagctaacttagattgaggaatgatgatcaaggagaacttttctgaggaagtgacattgtaagttgaggccctaacagaccaataggagctaaccagctaaagaggaataattaagtatgcttttagaggagcttgtatttctggaaaaatagtagactagatgtcaatataagttctgcctaaaataattaaaaatttttaatgtgtggcttagtaggaaaataaggagcatttttagaagccaggaattatgagaaagtctgaatcctgatatagaagtaaattctaggccaggcacggtggctcacacctgtaatccctgcactttgggaggccaaggcgggaagatcacctgaggttgggagttcaagaccagcctgaccaacatggggaaaccctctctctactaaaaatacaaaattagcagggtgtggtggcacacgcatgtaatcccagctacttgggaggctgaggcaggagaatcgcttgaacctgggaggcggaggttgcagtgagccaagatggcaccattgcactccagcctgggcaacaagagtgaaactccgtctgaaaaaaaaaaaaaaaagtaaattctaaacctgtgttttttttctctgggcatttgccaatccctcgtggccaaaaccatgggctttaatagatcttgtgcaggagacaaaaggcaaagccaggactctcaaagacttctctctcagtaagtgaactaggagaaaaagcccatccccgccccccccgccgccccccattaacctgttcttcccacagacatgctgttgggataattgcctgtcttaaccttagtgcttgaatgggtgggagtcatatatatcaattatatttttatatgcaaatacatttcatcataaaaagaaaagcataaaactctctagacaagcaatactatattgcaaggccctcagtaagaaaggtatttagcctttttcaaaaaagtaaaaggctggtacacatagaacaaaataagtgctggaaaatgaggttggagatgaagccagggaccagattcatgcaggtccttgaaggccttggttaagagtttgaattgtatcctgcaaatcttttgaagggttcctctctaaagatggaaggagagaggaaactgtagcagtattccaggtgagagggagatatgacttggattagaggaaactggaagaaatgaatggattaaagatacattttgaaggtaaaatgtgtctaacctgctgataaattagatgaaagacttgagagtgagtaaaatataaagggttattcctaagcacctgacttgaaaaactgcttgtccaaaagtctttttttctgagctgaggaagtcaggaggaaatttggaggggggaatgatcaagagttcagttttagaaatattaagtttgataaataaagaatgctaatggagatggtaccactgatataataaaactaaagaggtttttaaaatattcttagttagttgaactcgtaatcgaacaagtcaggatgtaatgataatgaaaatttaccttttataggcaattcaatttatagtaaatttcactgagaggcaaattttttaaagtagaatttcaatgcaataaatacaccattcatttaaattcacattcctgggacagaagagctggatgaatttgcagataaagtaaaatattcggagagagacgctgtggcagagattggctaactgttcaccaaatctattttcttttctttctgctgacacagctggactatatttcccagcctcctctggcttctaaaattattttcttttctgttttataagatgataataaaactctgttctcatagggattgtgatgagcaaactaaaatcagttctgaattgtcaaacgtgaaataaaaattcatttttattagtataggcatgtgactgagactgggccaaggaatgggaataaaagtgatgtatatttcttcctttggtctggttatgtaaaaaaaaaattccttatgcagctttcatgctgtctatcccttgtgtcaactggatattggcacccaaagtgacctcggaagccacacattgagggtgaaagaaccaccttcagttgaaattcctaaaatgactgcatggttcagaatccccatgcctacttttctgccatctgaactttgcataaacaaaaaaataaactattattttaaatcattgagattctgtaattcaactgcttcagcagctagcatatattaaaagatgttaatttgatttcaaggtggtatcaagaacataattttattcccattcatttcttttctcttttttttcaacatgtattttctgtcatacatgaccaggcaaattgagtagattaggatgttaggaggtttgtacagggagtgagggaagctaagatgtttgaggtatgagagaggagttgaaggatatactttctttctatgctccatatcagataatctgtttttctctctccctctgtctgacccagtaattcatttcaaagatgtattcttctgtagctatttctttccacctgctaatagcaccctcattgtaaaacagagacttgatgacaatcttgatctctctcttcttgcccagtttaataatcaagtttttacactgggatacaaaataatcataaatcaaagttgagaaatatgttttcttcctttgtacatctgatagtagatttcatagtatctcttgaggtaaacgcttttgagagtatgcaaagtgtgacatatctctgataggacttgctgaagccagaatgtgccctctgtatctttggccaatggattagccagctagacatactctgacattgttctctgttatatttacttatcagtctttttgcattgttggcttcatcgctccttctcttgagggaaggtatgaggtaaattcagttccctatgctgaacacccagcatgattcctggcaaaatgatattataagtgctttgtaactccttggatgaaaaccaaatgaatgctgaaagtagtgtggtatgtatctgactaataaaaatatgttccaggcggggcgcagtggctcatgcctgtaatcccagcactttgggaggccaaggtgggcaaatcacctgaggtcaggagttcaagaccagcctggccaacatgatgaaaccccatctctactgaaaatacaaaaattagctgggcgtggtggcgcatgcctgtaattccagttacttggggggctgaggtgggagaatcacttgaacccgggagggagaggttgcactgagccgagatcgtgccattgcactcctgcctgggcaacaagagcaaaactcggtctcaaaaaaaaaaaaaaatgttccttgtagaatgaattttctgtattattcactataaagaatttatttttaaccacatcaataatatgtctataagatataggtcattacctggaaattgaaaatatttttatgagaaacttctcattatgatgtttattgtgtaaggatcttaagttgttatcacctttgtttgatgaatgtatcttctacttgtgtactctaaaaaattatcagattatttttatgattggtagagtttatagttttgcaagaattgggcaaatctcacacacagggacaggtggaagagcatgcccccatgagagctttaaaggaatacattctggccctgtggagaattgcctcctcttcaattccagtggcatatggttagatttgggcaaacaaatgctatgccaaatatggcatttattgcctcagttcagatgccaggccaggctgaagtttacagctgtgtcctggttgaaattctaaaacaaaaggagtttattcttttaatctagtgtacccctaatctagaatgatggcattgttagcatctagaattattttctttcccattttatatgatgataataaaagctattctcataggaattgttatgagcagacctaaattcagtgctgatttgtcaaaagtgaaataaaaaaatcttttgtctgtgtggtcttaggtggcagaaatgtaattataagtaagccctaatttctgctaggtatactagtgcttgaccctagtgaatggatagtctctttatagaagtagatatattaatccctttaaccccttgaaaactagtagtagtagctatttgatatacctctttccaaaaagtttctagctggccaggctaagttctcatgcctttggtggtatagcatatggacatttatcttggcagtgattacgtgtaagtataaaagaaatacttaaaatgcaataaaatgagcatatctgtttcacaagactaatgtttcttgctaatcatagagaacctaggataaaatgcataatgttgatcattggaactgaggaaagcttaacaattatactatattggataggtgaaatctaggagtttctgtatacccagagtcctttcctaaggggtcctacctgtagcctcttgctaaggataccaactctagctagatacatatagatggccatgttctatattgcatgactttaccatcttgaccacatctcagaacatttgacctaaagcattcaggtagcttgaaggctgacagatttaacgacctagtacaagtgttttatctaactgatgatagtgacatagtggactgatcagatgttctttcttaggaaatttttaatttgaaatagagagtattatttgataggagcaaacaccaactgcttaaccagaaaaagaggcagacaaaaatgacatgggccgggcgctgtggctcacgcttgtaatcccagcactttgggaggccgaggcgggcggatcacgaggtcaggggatcgagaccacagtgaaaccccgtctctactaaaaatacaaaaaattagccgggcttgctggcgggcgcctgtagtcccagctactcggagaggctgaggcgggagaatggcgtgaacccgggaggcggagcttgtagtgagccgagatcgcaccactgcactccagcctgggcgacaaagcgagactccgtctcaaaaaaaaaaaaaaaaaaaaaaaaaaaaaaaaaaaaatgacatgagtcagtagaagccatgaataagcaagagtgacaagtaagtatgagctaagtcatgaacttttttacgtgtgtgtgtgtgtgtgtgtgtgtgtgttggtaggggtgggggtagatacatatatttaaattgtatctgtgggggaagaggatggtcaacaaattgctgccaaggggataaagaactaattacatcattacttatctattggattctgaacaacttgaaattctccatctgtgttcctatacttttcatgagacctggttaaactactttccatgagttcccataaggcctagccacaaaacatacctttgttccttattttcatgtgaaaccttacaatagctgttcccagttacccctctcacatgcacatccacacacagatacttgagacaactttactgagtctctattctttgtggtcaaaggatcctaatttatacagctgttctatgagttcagtgtttattattttagctctgtaaccaaggcaaggactgatgaacaatagcagttttgtggccacccaagaatatattgaccttgaataggaaaaagtaacgtatataatcctaattgtttaagagaggtgatgcattacagggagggctcagagaaagatggctaacactaatagcacatgttggcattgaggagactacgtggaaatgtgcatttagcaaaatagcttcagaacaatattttttctttctcccctattagattttgagttcctgaagcactcatcttggtgtgcctcaccaattcccaggagagggctctgtatataataggtgaaacactattgagtacataatgtggcccagctatggttctgtcttaaggtttagcagcagctttgaactgcctggtaaaaatattttttcaggcagactaaactgaactgaagagagagatacaagttagagacaagagtcggatttccagaaatttctgggagagatagatatagacagtgtagaacagccaagaaactatgggaggaatttcaaggaaccagataatatatgcataatgttggtcatcagaactaaggaaagctgaactattatactatattagataggccattcacatttaggggactaaggaccagaacatactgttatctagaacatcagaacatctgcagagcacagaacagcatagcatttggccagaaagcatgacatagagtatgggatagaggaggagaattggcaaaaaataaattctagattctgatttttaaaatgacagaacaaagattacagcattattttccttctcccttacaaattatccaactgcactgggagagcaacatggtagaaacatgaaccctatcttcaaagaaagatatatgcacaactccagactacaaaatgtgatgaagaatgataaatgcagttaaaaatgcccacagctgcagatctcacacaaagctggcagaactttctagggggcaaaaccaataatgcccagtttatgggataggatttgtgtactagcagcaggagctttcttggccttcctagggtataaagaagaaagcgggggtgctgggcacggtgactcacgcctgtaatcccagcactttgggaggctgaggcgtgcggatcacctgaggtcaggagctcaaaaccctgtctctactaaaaatacaaaaaaaaaaaaacaaaaaaaaagaaaaaaatttagctgggcgtggtggcaggcacctgtaatcccagctacttgggagactgaggcaggagaattgcttgaacctgggaggtggaggttgcagtgagctgagattgagccattgcattccagcctgggtgacagagtgagaatctgtctcaaaaaaaaaaataaaaaaaaaaaaagaagaagaagggtaatagactcaatgaggaatcacacagacaagatggaaaacatgggaaacacaaagaaaaaagtagagattatatctttactgtcagacaagattgaatttagtggaaaagttttaaataaggcaatgaggaataattcaaagcaacagtatagcattaaacatccataaagcagaaactacagaaaatataaagaataatagttacatagtagtgataagaatgtttattcacttctcttagttcataagagatcaagtggacaacaactaagagaaagaaaacccaaataaaataatgaagtcaatatttgagattgtcaagctttgtatcctgaaaactaagaatgtcaaataaaacattcacaaaaatagaccataaagaaaatttcaaagaatttcaaaaggcaaagtaaatatatacagcattctgtgatctcattgcaataaaagtagaacttaggaaaaagaatatcatcacctggacattttaaatttcctactaaaataattcttagatcagaagaaaccaaacaagttatagaaaatctaaaacaaaagcataatgaaaacaatacatatcagaacttgtgagatggagctaaaatagagttcagaggcacttatcttaatgaagaaagaaaataactccattaaatatctaactcaaagttagaaaaattatcaataaacataaaaaagcagaagaagggaataaaagttataaattagacaaaaattgatcagctaaataaaagagctgattttttaaaaatatgatattaagtttataaaatcaaaaagtagacaggaaagggcataaaccaagaaataatggggaaatgataaaaatagaaaagaagagaatcctaagaaaatattttgttcaatcctgtgcaaattaatttgagaacctagaagaaatggatgattttctaggaaaattgaaaaaataaatactaactttagataactagaaaatctaaactattagcacagaataactttcttttttttttttgatataggaagtcctttattttgtcatgtgaaaccatataacagctgcctaaccacaatgtagatgccaataggagatggctcagaaatagcactagtgactcaaatagtgaccattatgataaaaggaataaagttttgactgatttatagcagttttaaaatgcgttttatattgagtagttatttcatgttttctcaaaagaattattatgttaaaccaaaaataaactaggtatatagtttgttcatataacaaatctacattcaaagacatgcttacaaattttccacttagtccatttttctgttcttagcattactacaaatgcctccttccgtcatcatgttgaattcttcagcatcttctatatcatttccaggggcatctctgggaagtagtgatgcctgtcttccttcagaagcactgataaccccaatatacccacagtacacacattttccctctcctgaggtgtgctactttttggcacaacagaaaaaactcattactaggatttgaaaacctaaattctgggcctggttaggtcataaactacagaaccatagatcatatattctccccaggagcctgtttctccactgcataaataattcatatttgcttggccctttgtagtcctttactgtttcatttatcttcatgataacccttaaatttaagtaaggtagcagtatgctcattttatagaagaaattcagtctcaaagaggatacacagtctcccaaagatcccacaatagtaatatattaggcagagctaaactcacacaatcttactcaagatcctagtgctggtacatggtatgctcataagtttgctaaaatggatgaagcagcagtttctcaggtccctttcagtgatcctgttctctgcttccacttgatgttttttctctcgtctctcaactagcattaacatccaaaactatatataatcactaaatttcatttaccatcattttcttatttaattattctttaaatttttctatttccatgttaaatccagagaaatgttactttttcgaaagtttctactgctgcctgcctctctgaaggccatgggacttacctatttgtttgtcaaagcaaaaattcccaacattttgtaaacaccactaattactttttataactgtaaaaacaattattccatacttaaaaccaattcaaaataaaataaatcctcgatacttcttactccctggagtagtaattttaattagattctactgattcgtaattttttcctctgtgcctttatttgggaaatactgttagtctacctcactatcaagtctctttccctaacaagaaaatgtcacagtcttttttttttttttttttatactttaagttttagggtacatgtgcacattgtgcaggttagttacatatgtatacatgtgccatgctggtgtgctgcacccactaactcgtcatctagcattaggtatatctcccaatgctatccctcccctctccccccaccccacaacagtccccagagtgtgatattccccttcctgtgtccatgtgatctcattgttcaattcccacctatgagggagaatatgcggtgtttggttttttgttcttgcgatagtttactgagaatgatggtttccagtttcatccatgtccctacaaaggacatgaactcatcattttttatggctgcatagtattccatggtgtatatgtgccacattttcttaatccagtctatcattgttggacatttgggttggttccaagtctttgctattgtgaataatgccgcaataaacatacgtgtgcatgtgtctttatagcagcatgatttatagtcatttgggtatatacccagtaatgggatggctgggtcaaatggtatttctagttctagatccctgaggaatcgccacactgacttccacaatggttgaactggtttacagtcccaccaacagtgtaaaagtgttcctatttctccacatcctctccagcacctgttgtttcctgactttttaatgatcgccattctaactggtgtgagatgatatctcatagtggttttgatttgcatttctctgatggccagtgatgatgagcattttttcatgtgttttttggctgcataaatgtcttcttttgagaagtgtctgttcatgtccttcgcccactttttgatggggttgtttttttcttgtaaatttgttcgagttcattgtagattctggatattagccctttgtcagatgagtaggttgcgaaaattttctcccatgttgtaggttgcctgttcactctgatggtagtttcttttgctgtgcagaagctctttagtttaattagatcccatttgtcaattttggcttttgttgccattgcttttggtgttttggacatgaagtccttgcccacacctatgtcctgaatggtaatgcctaggttttcttctagggtttttatggttttaggtctaacgtttaaatctttaatccatcttgaattgatttttgtataaggtgtaaggaagggatccagtttcagctttctacatatggctagccagttttcccagcaccatttattaaatagggaatcctttccccattgcttgtttttctcaggtttgtcaaagatcagatagttgtaggtatgcggcgttatttctgagggctctgttctgttccattgatctatatctctgttttggtaccagtaccatgctgttttggttactgtagccttgaagtatagtttgaagtcaggtagcgtgatgcctccagctttgttcttttggcttaggattgacttggcgatgcgggctcttttttggttccatatgaactttaaagtagttttttccaattctgtgaagaaagtcattggtagcttgatggggatggcattgaatctgtaaattaccttgggcagtatggccattttcacgatattgattcttcctacccatgagcatggaatgttcttccatttgtttgtatcctcttttatttccttgagcagtggtttgtagttctccttgaagaggtccttcacatcccttgtaagttggattcctaggtattttattctctttgaagcaattgtgaatgggagatcactcatgatttggctctctgtttgtctgttattggtgtataagaatgcttgtgatttttgtacattgattttgtatcctgagactttgctgaagttgcttatcagcttaaggagattttgggctgagatgatggagttttctagataaacaatcatgtcgtctgcaaacagggacaatttgacttcctcttttcctaattgaataccttttatttccttctcctgcctgattgccctggccagaacttccaacactatgttgaataggagcggtgagagagggcatccctgtcttgtgccagttttcaaagggagtgcttccagtttttgcccattcagtatgatattggctgtgggtttgtcatagatagctcttattattttgaaatacatcccatcaatacctaatttattgagagtttttagcatgaagggttgttgaattttgtcaaaggctttttctgcatctattgagataatcatgtggtttttgtctttggctctgtttatatgctggattacatttattgatttgcgtatattgaaccagccttgcatcccagggatgaagcccacttgatcatggtggataagctttttgatgtgctgctggattcggtttgccagtattttattgaggatttttgcatcaatgttcatcaaggatattggtctaaaattctcttttttggttgtgtctctgcccggctttggtatcagaatgatgctggcctcataaaatgagttagggaggattccctctttttctattgattggaatagtttcagaaggaatggtaccagttcctccttgtacctctggtagaattcagctgtgaatccatctggtcctggactctttttggttggtaaactactgattattgccacaatttcagctcctgttattggtctattcagagattcaacttcttcctggtttagtcttgggagagtgtatgtgtcgaggaatgtatccatttcttctagattttctagtttatttgtgtagaggtgtttgtagtattctctgatggtagtttgtatttctgtgggatcggtggtgatatcccctttattattttttattgtgtctatttgattcttctctcttttcttctttattagtcttgctagcggtctatcaattttgttgatcctttcaaaaaaccagctcctggattcattgattttttgaagggttttttgtgtctctatttccttcagttctgctctgattttagttatttcttgccttctgctagcttttgaatgtgtttgctcttgcttttctagttcttttaattgtgatgttagggtgtcaattttggatctttcccgctttctcttgtgggcatttagtgctataaatttccctctacacactgctttgaatgcctcccagagattctggtatgttgtgtctttgttctcgttggtttcaaagaacatctttatttctgccttcatttcgttacgtacccagtagtcattcaggagcaggttgttcagtttccatgtagttgagtggctttgagtgagattcttaatcctgagttctagtttgattgcactgtggtctgagagatagtttgttataatttctgttcttttacatttgctgaggagagttttacttccaactatgtggtcaattttggaataggtgtggtgtggtgctgaaaaaaatgtatattctgttgatttggggtggagagttctgtagatgtctgttaggtccgcttggtgcagagctgagttcaattcctgggtatccttgttgactttctgtctcattgatctgtctaatgttgacagtggggtgttaaagtctcccattattaatgtgtgggagtctaagtctctttgtaggtcactcaggacttgctttatgaatctgggtgctcctgtattgggtgcatatatatttaggatagttagttcctcttgttgaattgatccctttaccattatgtaatggccttctttgtctcttttgatctttgttggtttaaagtctgttttatcagagactaggattgcaacccctgcctttttttgttttccatttgcttggtagatcttcctccatccttttattttgagcctatgtgtgtctctgcacgtgagatgggtttcctgaatacagcacactgttgggtcttgactctttatccaacttgccagtctgtgtcttttaattggagaattgagtccatttacatttaaagttaatattgttatgtgtgaatttgatcctgtcattatgatgttagctggtgattttgctcgttagttgatgcagtttcttctcagcatagatggtctttacattttggcatgattttgcagcggctggtaccggttgttcctttccatgtttagtgcttccttcaggagctcttttagggcaggcctggtggtgacaaaatctctcagcatttgcttgtctgtaaagtattttatttctccttcacttttgaagcttagtttggctggatatgaaattctgggttgaaaattcttttctttaagaatgttgaatattggcccccactctcttctggcttgtagggtttctgccgagagatctgctgttagtctgatgggcttccctttgagggtaacccgacctttctctctggctgcccttaacattttttccttcatttcaactttggtgaatctgacaattatgtgtcttggagttgctcttctcgaggattatctttgtggcgttctctgtatttcctgagtctgaacgttggcctgccttgctagattggggaagttctcctgggtaatatcctgcagagtgttttccaacttggttccattctccacatcactttgaggtacaccaatcagacgtagatttggtcttttcacatagtcccatatttcttggaggctttgctcatttctttttattcttttttctctaaacttcccttctcgcttcatttcattcatttcatcttccattgctgataccctttcttccagttgatcgcatcggctcctgaggcttctgcattcttcacgtagttctcgagccttggttttcagctccatcagctcctttaagcacttctctgtattggttattctagttatacattcttctaaatttttttcaaagttttcaacttctttgcctttggtttgaatgtcctcccgtagctcagagtaatttgatcgtctgaagacttcttctctcagctcgtcaaaatcattctccatccagctttgttccgttgctggtgaggaactgcgttcctttggaggaggagaggcgctctgcgttttagagtttccagtttttctgttctgttttttccccatctttgtggttttatctacttttggtctttgatgatggtgatgtacagatgggtttttggtgtggatgtcctttctgtttgttagttttccttctaacagacaggaccctcagctgcaggtctgttggaataccctgcagtgtgaggtgtcagtttgcccctgctggggggtgcctcccagttaggctgctcgggggtcaggggtcagggacccacttgaggaggcagtctgcccgttctcagatctccagctgcttgctgggagaaccactgctctcttcaaagctgtcagacagggacatttaagtctgcagaggttactgctgtctttttgtttgtctgtgccctgcccccagaggtggagcctacagaggcaggcaggcctccttgagctgtggtgggctccacccagttcgagcttcccggctgctttgtttacctaagcaagcctgggcaatggcgggcgcccctcccccagcttcgctgccgccttgcagtttgatctcagactgctgtgctagcaatcagcgagattccgtgggcgtaggaccctccgagccaggtgtgggatatagtctcgtggtgcgccgttttttaagccggtctgaaaagcgcaatattcgggtgggagtgacccgattttccaggtgcgtccgtcaccgctttctttgactcagaaagggaactccctgaccccttgcgcttcccaggtgaggcaatgcctcgccctgcttcggctcgcgcacggtgcgtgcacccactggcctgcgcccactgtctggcactccctagtgagatgaacccggtacctcagatggaaatgcagaaatcacccgtcttctgcgtggctcacgctgggagctgtagaccggagctgttcctattcggccatcttgaaaatgtcacagtcttaagagtcaggaaagcttttactttcactatcacatatgaagaatgaactaaacacctaaactggacagtaaaacttaaatgagggattcaggatatttcccaaggggccatatgacgaatttaaaagttggtatgatgtgcctaaaataacacgctcttttacttataataaaggtacagatgtagtgattagtcatgctgacatgtacatataaaatatgcctatgccaaattaaaagaaaacaaaatacattctatggcaatcctgaaaagtcagggaggtcaataaatattaagagtatgctctcacaattagcattaaacacatggtaattaacacaatttaatatgtgaaaaatgagaaaatatacaggatgagaagtacacttaggaatttgttgtgattttcttcattttgattgtattgctttcttgtcttcaggagatttcgacttctgaattcgcatctttctgttctaaatggtattcttgggctattttctcagcagttcatgtttctggataaagtttatgattattgagaagtgtcaatgcttctacaatggaaattttgcctttgggaatgatcttaatatttatcatattaaagtgatggccaaaaggcaatctgaattctttcagctcttgacatctttcagcagcttttacctgcatggaagacacaggatctttggaatcaacatacacatcttttagaaatgacagcagcttgtcatctttatgagcaatctctcccttaatttctggatagaaactaatctgctcttgcaggaggctgttggtagaggggtgtctgggattgggagggggcttcatcttgttgatttcccattcctctcagttctctaggttgaaattcctgatcctgcgagtcactgcagcccccatctcctcataacatgatgccctcaggtttacgccacacgtgggaacaccagtgcaggaaacctccggggtaccctagaataactttcttctactgaggccttggtgatttaacaggagaattctaccaaacctttcaggaataaatcaactcagtcttcccaaatacatatgctttaataaatgtggatatctctggaaggacacatgagaaactagtaaacagttattattcccagggaacagaactgggactgagggacattattagaaagaagtcttgctttttcctgtatatcttttataccttttgtgttttgtaccatttgcatatggtactcatccaagtatgaggaatttagaacatctttgttttacatttgaacaagttgacaacactgtttggcttttgttattatgtttaccttacgttttcagtaaatgtagtaggcataatttcttaaatacctcccttccccaaagatgtcccaccgtaattcctggaatcatgatgaatatgatgctctattactgattctgtgattatgttttgccatatggcacagttgacattaaaataggaaattcaagcctacattatctgagtgggcctaatcgaatcatatgagccttgaaagcagagagctttctttggctaatggcaggaaggaaagtcaaagagattggaagtatgagaaggactcagtgtgcaatagctgctttgaaagtggaggagaccacttgagaaagaaggcaagtagttttgaggagctgagggcagctcccagctgacagctagcaagggaactggccaaatccttgcaacctcaaggaactactagctctgtcaaaaacctgaaagaggttgagagtggattcttccccagtctccagatgagagtccagcccaacaggcatcttgatttcagctttgtgataccctgagcagagcccacttgggactcctgacctatggggatgtgagataataaatggatattgttttcagctgctaaatatgttatataggagtagaaactaatagagcaaaattatgttctaaaactttaatacatgtgggctttcagaggctttagagatgggagccatattccctccagtctgggtgtgatgggtagtgccaaagaagctgcagagccggtggaacagtgtcatgtgtcagccagaggctgcatcgtttccattggtgccataagtagaatatgctctgctgtcttttcattactttctccaattgtgcagagaatgaattttttatatctgtctcagtctttagaagcaattttttagcatttctgttttaaataatcttgtattttcaatgaagaagttgccatttctttctttttttttgagacagggccttgctctgtcgcccatgctggagtacaatcaccacttactgcaaccttgaccttccaggctcaagcaatcttcccatctcagtctcctgagtagcttggctacagacacgcaccaccatgcacagctttttttttttttaattttttttgatagagacagagtctctctgtggttgcccaggctggtctcgaactcctgggctctagcagtcctcccacctcagcttcccaaagtgttgggattacaatgtgtgccacaacacctggccttttctttggatgtcttaggaaattaactcctacctttctaaaaattcctgggtttatgtgacctggatttaaatggtcatgagagaaatttctgatatgatagtgcaatcaagtaacactggaattctttgactaccttagtttttctagagtttcacttaaattaacccaattttgttccattggcagttttatccaagactgaataaaggtagtttaccttttaagttgctatacactagaacttacctttcaattaattcttttaatttaacagtgtggaaagctattatttactttttatttaattgatagtacttttgtaaacttttacctgaaaaaagtaactttgagaaccacagagaagaaacatattggttaaggtttctgaagagtgtcggaggattcaagagtgtggggaattgcttctgtgattcccatcacttcacattctgagtagaaaagcacacaacagaaatgctgcaagtcagcatcaggagtccatagcatccatcatcaagtgcaataagactgtgactctctgttactgagttgtgatgctttttctttttgccagtaagttacatggtccagttttttctttcttagatgacttcagggacttgttgtaagcctgctgaggtcaaggaatgcttctgccttatgtgcagtgtattataaaaagatttatctgtgataaaagtggaactcggctgggcatggtggctcacacctgtaatcccagcaatttgggaggctgaggcgggctgatcacttgaggccaggagttcgagaccagcctggccaacatagtgaaaccccatcgctactaaaaatacaaaaaaattagctgggcgtgttggcatgggcctgtaatcccagctactcaggaggctgaggcaagagaatcacttgaacccaggagacagaggctgcagtgagctgagatcatgccactgcactccagcctgggtgacagagcaagatttggtctcaaaaaaaaaaataaaaacaaaaaaaagtagaacccatgaagaaaaatttaaacaactgattttaatgactgtaaaggagtatcactagtagaaaaatgtttctatattgttaggataatcaagtttctttaaagataatattgatcatttttagcagaagtttgttatttatctttaggaaatgaaattaaatattttgctttgttttgtttttaatgtttctaaaaggaatgaaactgcattattgctgattctgttgtggattgaggcatttagagtagcaaaaattatattaatgctctgtgccaaaacacataaaatggctttatcactgattggtgtctcaattataaaaaggtaataatttgcataatatgataagaatgccacttgaaagaaaggaggctgggttgttttttttttttttaacatccagtaaaacatgattgacatcatctagtcaaattatatattatactgagctttattttctgtataaaccatattttacagatattattttaaaagaaattgaaatcttctgggcttaggtttcagagttatatataactcataagtgagctgtgtgagctgagttccttaaacctaggtctcatttcaaaggctagctttgggctggttgcagtggctcacgcctgtaatcccagcactttgggaggctgaggcaggtggatcacaaggtcaggagatcaagactatcctggctaacacggtgaaaccctgtctctactaaaaatacaaaaaattagccaggcatggtggcgcacacctgtagtcccagctactcgggaggctgagacaggagaattgcttgaacctgggaggtggaggttgcggtgagccgagatggcgccactgcactccagcctgggcgacagagcgagactccactccatctcaaaaaaacaaaaaaaacaaaaaggctagctttgttccaaagcccaaacctggctctggtagactattttctaagctatctcttgatgagctttgctaaaggaaagggaagtatggtacagatcacctcaaagtcatgtttggctctctctgcatttggagttttcctctggcatgtttatattctgaataatgcttctcctaggctaaatacagtttggaccctgcatcttacaacagatgtgacagaggaatgcttatggtcaataatgatgtacagtccacagtgataaagaaattggtgggaatgagactttgagaagtataatgaatgtcagattgcaggctgcccatagtacatccagcatcagcacactgtagtttgccttaactaatttgggcctctgcagctttgggacagtattgcaaataggtggtataataagcttaaataacagatttccatcacttaaatatgaaaatctcagatttgtcacagtaataatattgacctcatgtttttgtttttattttttgttcattgacttcatgaatgaatagtttggcaggaaagcaggtaatacacttccaggccttatattacataggtgttgaggctagagaatgtcacagaggcgtgcccttattcataaaacactaggggaaatgccttactgtgttttattaagcgaagacctttcattgtaaaggtgagattattcctttagaaaccatataaattactgaagggaattatgagcaagaatatattttgggttcatagatgccaaatgcccatctcactggatgattattattctaagtattttccattacctagtttcagctcaggaaatcaattagacccttaagggcctaagcaagcaggaaatgagtgatagatttatagattccaccagtgaatttgaaaaaaaaacttttaccttttaaattataactgcaatagactcaatataaatgctttttttttttttttttttttttttttttttttttttttttttttgagacgttgtctcactctgtcacccaggctggagcgcagtgatcttggctcactgtaacctctgcccccaggattcaagtgattctcttgcctcagcctcctgagtagctgggattacaggcacgtaccaccgcatctggctagtttttgtatttttagtagagacagggtttcgccatgttggccaggctggtctcgaactcctgacctcaagtgatccacccgcctcggcttcccaaagtgctgggattacaggagtgagccaccacacccagcccataaatgccttttttagtgctccctctttctttcctatgtaaacccttttcaagttagattttccctatgatattctcaataaagaacaaattacataaaatcaggaacctgattttatattaagtgtaggaagtcaaattaccattgagcgtaggtcatatattctagtagtagagaccaatctattttctgccttgttctggagggtcatagcaaatctgaaccaggcagccaggtagaccaccactctgatggccccattcaagcttagagcttccccagtctgaaagacactggaggaagcttcttcccaccttatttagctccaagagttcagttgtgctctgtggaacactaggaataactgtatcctagacataaaccaagggcaagacatggttttagtttccatgagggcctttgcttaagagtcagaagggctgctacacatcttaattttgccactgaatagctatgtgataccaggcctttgacataagcagttaagttagaggactccagagggcctgtccagctcttacataagtctaaattccacctgtgatttcataggatccttaagtaagcattccacttctatgggcctcattttctgcccctattaaacaaagacatggctcttgagagcctgtttaaagcaggtttttgaaaagaaagtctcaagtcaaagaaattttgaaatggatttagattaaaaggtatttttgtgtgtgtggagaatgtgggattaactcacttatttttattatgtatagaaatttcagtttgttactatagactatttacagaaatatgagttcttgagtttttcattctgctaccccagatgtgtagcactctgctttgtacatagaaagcacttagcaacttgtgtgttctcttgaatttaactgaagtcccacttgaaaaggtaaagttatataaactactttttagtatttgaagtttctttaagcctatttttaatgatggcttggtgttcatgcaatgacttatttttgtttgtactggcagagcgtagctttttcagttggccagttaaaatggaaagacaagctggacgcagtggctcacgcctgtaatcccagcactttgggaggccaaggcgagtggatcacaaggtcaggagttcaagaccagcctggccaagatggtgaaaccccatctctactaaaactacaaaaaattagccgggtgtggtggcgggcacctgtagtcccagctactcgggaggctgaggcagagaattgcttgaacacaggaggcggaagttgcagtgaaccaagatcgtgccactgcactccagcctgggtgacagaacaagactccctctcaataaaaaaaaaaaaaaaagaaaagaaaagaaagtaagacaacttgtgctcttatttttaaaatattatatacttctagccccatacaaatattctcagattagactaaccaattacacattggaatacctggacagttttaaaatacaactaaaactgaacagaagcatccaaaggtcaaccactgttttactggacataccttttactttgctattttatgtattttatattaaagttagacctttgaggccaggtgcagtggctcacacctgtaatcccagcactttgggaggctgaggtgggcagatcacctgaggacaggagtttgaaaccagactggccaacatggagaaaacccatctgtactaaaaatactaaaattagccgggcgtgctggtgcgcacctgtaatcccagctactcaggaggctgaagcaggagaatcacttgaacctgggaggcggaggttgcagtgagtcaagatcaccccactgcattccagcctgggagacagagcaagactccgtctccaaaaaaaaaaaaagttagacctttgggtttaaaagccccaggataaacacatgaaaaaaactttcaaaatttacaagtgtaaaatatgctcagtacatccttcttcccacccaaccaaacaacaacatctcaagttaaatcaagtggtataaaatgtcaacctagaattctaccactgccccagggaagttctgtctgcccactgtcgtctgcttttacaggtctacactagaaacaacttcccttgataggaagtactgactttgttcagagctgtaaaattatacccagaacctcccttgttcttgttctatatgagtcccagggcctgagagccgccatttatgacgctttggtttgtcacaccctgcacacaccattagagacatttttctctcttggctttgtatctgcttccttctgttgctaccctctccatttcctattttcctaatttttaaaaatgaaatttatttttgctttttcatttgtctaagacttaggctttcatttccccagctgtaaatcaggcattagataataatctctaaagccaattccaatactctgtgaagtcattgtatcttatatttatgagtaaatatagttatcatctttttgataataaattcatcaataaaccatggattggaatacataagaatctgaaaaccctttataaccctcctatctctgaaattcacagatactgctatatagaactgattgatgaatttcaataatatctacaccaacatataattaataatgatatgtattaataatattgataacaatgagacacccacaggtgacttgtcagtaactgatttgtgatttcctaattttaagagtgtgtgtattcttgttgtaatctatgagagcaagaaccttctcaaaataaaagaaagtttttcacagatactaattcagtgactcatttactgacaattttcagtagggtcagaaacaatatcagattggtctgaaattataaaaaatatttttaagagtctaatagttaaaagttaatttggggtgaaaaacaactcctctctataattgtattttattttattgttttattgtttaattattttattgtgtatttttaggcagggtctcactttgtaacccaggctgggatgcagtggcactcattgcagtcttgacctcccaggctcagatgatcctcctacctcagcttcccaagtagttgggattacaggcatgtgccaccatgcctggctaatttttttaaaacttttttgtagagatggggtctcactacgttacttatactggtcttgaactcctgggctcaagtgatcctcctgcccttggcttctcaaagtattggaattacaggcataagccacacactagaccagtaattttaatatactgtatatccatggtcctcaacagggagtgattttgccttgaggggacatttagcaatgtctggaagatattttggttgccataaccttgggttgtgagatgctactggtatctggtgtgcagaggccaatgattgtgcaaagcatctttaaatgcacaggatagctccccacaacaaagagtcagccattccaaaacactaatagtgccaagattgaaaaactcttccgtatgtgactgtgtgactcaactgagttctatgatttggagagtcttttcatatttaattctagaggttgtgaaaataaaatgaaggtcattataatgtcatagttcagccatgtgtaccattaccaactgcttgctgactcttggccttttatccttacctagactattagaccttcacaatggattcttaagtctggcctgagacacttattattactacaggaaaacaaaaaagaaagcaaaagatcctactatctggtaataaatgtctcatctgagcaggtttaaagatcaaataatctttgaaaaataacaattctggctattattaaaaagtcaaaaaataacagatgctggtgaggttgttgagaaaaaggaatattttacactgttgatgggagtgtaaattagttcaaccattgtggaaaagatagtgtggcgattcctcaaagacctaatgacagaaataccatttgacccagcaatccctttagtggttatataacaaaaggaatataaatcattctgttataaagacacatgcatgcgtatattcattgcaacactattcacaatagcaaagacatggaatcaacttaaatgcccatcagtgatagactgtttaaagaaaatgtgaggccgagcgtggtggctcacgcctttaatcccagcactttgggaggccaagacgggtggatcatgaggtcaggagatcgagaccatcttgcctaacatggtgaaacgccatctctactaaaaatacaaaaaaaattagccaggcgtggtggcgggtgcctgtagtcccagctactcgggaggctgaggcaggagaatggcatgaacccaggaggcagaggttgcagtgagcggagattgtgctactgcactccagcctgggagacagagcgagactccatctcaaaaaaaaagaaaatgtggtacatatataccatggaatgctatacagccataaaaaagaatgagattgtgtcctttgcagggacatggatggagctggaggccattatccttaacaaactaacaccgaatactgtgtgttctcacttacaagtgggtgctaaatgatggtcacacagaggggagcaacacacaccggggactaccagagggcagagggtaggagggagaggatcaggaaaaataactaatggatactaagcttaatacctgggtgatgaaataatctgtacaaaaaaaccccatggcacacgtttgcctgtgtaacaaacctgcacatcctacacatgtacccctgaacttaaaagttaaaaaaaaattagaaataacaatttttatatagcagtatgctttaaaatgatgtcatggactgttaaacttcagtagacttgaccaatcatttagtccaatgctttttttttttttttttttttttccaaataaagtaagagcctcactatctaagctcacatggtatattggttgcaggattaatacaaggaggcatgattacatgatcacaatccagacacaagtcacctccttcatgacaaaattcatcacaaatgtaggttctttatgtggttcttatatggccctcactagcttttgcatcaaggtttgctcagtgtggactttacgaaaatcaggaaggagatgatttagtgagtaaggggattagaaattgtatcctggcaccatttacacaactcgcaacacaatattaaaaaatgactagggagacggaggtggaaggatattttatttatataaatcttagccatgcccagtggtacacacctactgtcccaggtacttgggaggctgaggcaagataagttgaggttgcagtgagctgtgatcatgccactacactccaatctggataacagagcaagaccctgtttaaaaaaaaattaaaaatcaagtgattttttaaaaatgaagaaaaggacaagtagagaggtagggtggggaattttcccttgaatcctcaaaataataaaactgtatattccactttttatctccttccttcacaacatttgaaattccacagtaattttcccttcggttatttgcctatttcctttttaatggtttccattgttatacccagtagattaaacaacattcttctttacttattgaattgatatagtaagatctgcaaaaaaaagttattccaaaatgcttatagtaaagaacaaagtttttagggatctaatagtttctttccttcccaaccttattgagatataaatgacaaataaaaattatttatatttaaggtgtataacatgatgcatacattgtgaaataattaccacagtcaagctaattaacacatccaataccccatatagttaatgtgtgtgtgtgtgtgtatgtgtgtggtgggaacacttatgatctagcaaatctacatctcccttaccaaacttcaatatacagtagagtatcatgaacttgtagtcaccatactgtatattagatcctcagaactttgtcatcttataactgaaatttgggccctttgagcaacatctctctatcttatcccccgacaaggagcaaccaccattctactctctgcttctgtgagtttgacatttttagattccatctgtaactgaagtcatataatatttgtctttctgtgtctggcttatttcacttagcataatgtcttccagcttcatccatgttgtcatgaagggcaagatttccttcttttttatgactgaataatattctattatgtatatctataaatgtaaatatatataccaccttttttgtatccattcatccatcaacagatgcttaggttatttctatatcttggtcattatgaataattctgcagcgaatgtaggagtgcaaatatctcttcgagatactatgctgatttcattacctttggttacatatccagaagttggattgctgcagtagttccattttttatatttgaagatcctctgtactattcttcatagtaactgggccaatttacatttccaccaaaagtgtataaaagttctcttttctccatatcctcactaacaattgttatctctttttttttaaataatggccatcctaacaggtatgaggtaatatttcatggttttgatttgtatttccctaatgattaatgatgttgagcaccttttcatatacttgctggctgtatttatgacttctttgggaaaatatctattcaggtcctttggccatttttaaattgggttatttggtgttttgctgttgagttatatgaattctttaaatattttggatattaatccctcatgagatatatagtttggaaatattttcttccattttctaggttgcatttccattttgttgactgtttcctttgctgtgcagagctttttagtttgatgtagtcctacgtgtttatttttgcttttattgcctgtgcttgtgtcaaaaaatcattgccaaaatgagtgtaaaggagtttttcccttaagttttcttctaggagttttgtgatttcaggtcttaaatttaagtctttaaatatttcacgttaatgtttgttatggtataagataagggtccagtttcattctcttgcatgtggagatccagtttttccagcaccgtttattggagggactatcctttccccattgtgtattctccttggtgcccttgtcaaagagagatctagtagtttctaagcagcatcatgaagctgtatctttactgatttcatgttacaacaaaatttttttaagcacaaacccaggggtgtgacataccctgaaactggtgatttgaaaaacagtactgttagagaaagggatctatggagatcattgttagtagtagtaattggggcattggatcaggataccccagttatcctgatccaataccttaattatataattaagtttttaagtgtagaagtgggtgtaatgatcactgttttgataaaattaaaatattaatgtgttaaagtacccatctcatttggtgctagtagaaaacgaaatgcataaaaactattgctaaaagtcactaaacctctcttacagcctaattagcaagttaatgctttttccttttggctgttccctaatttttcattcaatttatcttttcctgaaaacctgctaatttcatgcactttagccctacggaagaggacgttgcttagcaactgcctaaataactaatagacctaggtatctagtaaaggcttgaaggatttacttattttaaatttatatatttgtgtattaaccatcaaatccaagaggaagttgtttcactttggtatttcttcggatttctgcatttttatgattaattcttttcttttttttttaaatggagtcttgctgtgtcgcccaggttggagtgcagtagctcgatcttggctcactgcaacctctgccacctggattcaagtgattctcctgcctcagcctcccaggtagctgggactacaggcgcacctaccatgcctggcaaatttttgtatttttagtagagacggggtttcaccatcttggccaggctgatctcgaattcctgacctcaaatgttccacccacctcggcgtcccaaagtgctgggattacaggggtgagccactgtgcctggcctgcatttttataattaatttgtacatgagttgtttgtagcaaaaaaaaaaaaaaagaaaaacagtatatttaatgggaacttcttttttctcccttcaacctcttagtaacattgctgtatttgtcatttactttagttaatcttttctaacagaataccctatcaatgatatttgctgagttaagaaatgttttctgggccgggcgcagtggctcatgcctgtaatcccagcacttttggaggccgaggcgggtggatcacgaggtcaggagatcgagaccatcctggctaacatggtgaaaccccgtctctactaaaaagacaaaaaattagccgggcatggtggcggacgcctgtagtcccagctactcgggaggctgaggcaggagaatggtgtgaacccgggaggcggagcttgcagtgagccgagatcatgccactgcactccagtctgggtgacagagcgagactccgtcttaaaaaaaaaaaaaaaggaatgttttctggccaggcacagtggctcacacctgtaatcccagcactttaggaggccaaggcaggcagatcatgaggtcaagagttcgagaccagcctggccaacatggtgaaaccctgttgctactaagaatacaaaaattagccgggagtggtggtgtgtgcctataatcctagctactcgggaggctgaggcaggagaattgcttgaacccaggaggcagaggttgcagtgagccaagatcgtgccactgcactccagccttggcaacaaagcaagactctgtcacagaaaaaaaaagttttctaattcactggatacagaattctataatatttctttttaatggtaagctaattattttagaggaaatacattaaggttttaggagaaggaatttagaaattaaattgaagtcgttgctattacctatacatgatggttttacttttggttgtttgacccagaagtatctcagaagctcatctgagctaagggttttctaaggtttgagggtatgagtggtgctgtcattttgcaatgtcctgttatacttaatttagccttggtgtgtttacttgtctgaggttaagtctccccactatgacatataaagctgtattattatccaaatctcagacctattttcttcactcttatattagttcattctcacgctgctaataaagacataccagagactggttaatttataaaggaaagttgtttaattgactcacagttcagcatggctggggaggcctcaggaaacttacagttactgcagaaggggaagcaaacatgttcttcttcacatggtggcaggaaggagaagaatgcgagcaaaatggggaaaagccccttctaaaaccatcagatctcatgagaattcactcactatcacaagaacagcatgggggaaccacccccatgatctggtcacctcccatgaggtccctcccccaacatatgggaattacaatttggattacaattcaatatgagactttgtctggggacacagccaaaccatatcaactgtgtttctgttcaactgccctgaagtaaaaacaaaataccagcaaattttcttactgcaccctttgcattctgtggtgttgagacattaaagaccatttgcatcaggctagtgtggtggctcactcctgtaatctcagcactttgggaagcctggggagaggatcacccagagctcaagggtttgagaccagcccggacaacattgccaaaccctgtctctacaaaacctacaaaaattagctggatgtggtggcacacacctgtggtcccagctacttgggaggctgaggtgggaggatcaccgaagcccgggaagtttgaggctgccgtaagccaagagattgcgccactgcactccagcctgggtgacagagtgagaccctgtctcaaaaaaagtaaataaataaataaaagaagaccacgtgccacttgcacaaatatattagcagtaaaaagaacacatagttgggcatgatggcacatgcctgtaatcccagctacttgggaggctgaggcaggggattatttgaacccaggaggtggaggttgcagtgagccgagatggtgccactgcattccagcgtgggtgacagaacaagactccctctcaaaaaagaacacaggcaacttatattaatagtgttaagcgagtctacattaaagagaaactgtgctttcaaagagttacttttgtctcagaatgaagctcctttacaaaatggctgctttagaattctatcttgcagagaggctttgggcaaatttatagcatattttctttcacaggcaagaactcctaagatatcattttgtgtaatgattaattatcctctatagatatcagagatttttttttgttttaatggagtatcttcagtaagacattaccctatcataaaataaagtgtatttaaagcaatattgccaggcacagtaacttgtgcctgtggtcccacccactcgggagctgcggtgagaagattgcttagcccaggaattcaagtctggcctgggcaacatagcaagaacctgtaactttttaaaaaaggaaatattagattattagtagctatagtaactataaataatagaacatttcatctacaattgactaatatagagcttatttataaactgcaatctgtaagactgtatgtatcatgttcacatctcaactgtgctcatatctcatttgcattgtcaaccactgtacaaagagaacaatgtaggataactagagtgaagtttaaagattcatacttagtaagttatctgatacaaagacaatatctgccaaatagtttaggacaaaaatgatttttaagagatatgtatctttgagagagagtgaaggagaggaggggagagggagggagggggagagagagagagagagagagagagagagagagagagagagagagagagagagatgccagcctgccaatattcaaagagtttaaacttcaaccataacgtttattttttctccttctctcatctttccctctatatctatctatagaaatataaaaacatattttagatttaacataaaaaattaactgtcattcaaatgaatgaaattagaatgttctgggcattgccactgccaccactatgacagctgttttagaattatgaaaatctttttattattttattttagaccattaagcaatttactattgctcttaaagcatacataaagccaatttttaacatcatggaagccatcgctgacaagaatgttgcctcaattcacatgatattttctattatagcagtctgttaatgtgtattgcattcatcagtaacttgaggaggaattgataaattgccttcagtcttctttctcctcatatttgcgaatgccttatataataaatactactacaggccaggcatggtggctcacacctgtaatcccagcactttgggaagctgaggtgggtgaatggcttgagtttgtgagttcgagaccagcctgggcaacatggtgaaaccccttctctactaaaaatataaaaaatgagccaggcttggtagtgcatgcctgtagttccagctacttgggagactgagagaggaggattacctgagcctggaaggttgaggccacagtgagctgtgatcgtgccactgcactccaccctggacaatagtgagaccctgtctcaaaaaaaaaatttttttttttaaatttaaaaattagctgggagtggtggcgcttgtagtcccaattactgtggaaactgaggtgggaggatcacttgaacccaggaggttgaggctgcagtgagctgtaaatgcatcactgcactccagcctgggcaacagagagaaaccctgtctcaaaaatgatagatagccagccatggtggctcacgcctgtaatcccagcatgttgggaggctgaggcggccggatcacgaggtcaggagttcaagatcagcctggccaacatggtgaaaccttgtttttactaaaaatacaaaaattagccgggtgtggtggtgtgcgcttatagtcccagctgcttgggaagatgaggcaggagaaatgcttgaacccgggaggtggaggttgcagtgggccgagatcgcgccaaaaaaaaaagatagatagatagatagatactgttggatgcaatataagttttcagcccatattttcgttatataaggatacaacattaagagcaaaatactaagataagagaaatatagagtctaccattagaaattttaaaacttctatttcaggatttctaaatgggctattcaaaagtgaattgaatctcctgtcttttctcttgctttcatttgtgacaaacctgatgtaggtgggaaaaaacctgagcctttgtaatcacatgtttgggtttaatcataactctcatttagtagtagtgtgacttatttatttatctgagacagagtcttgctctgtcacccaggctggactgcagtgacgtgatctcagctcactgcaacctccacctcctgagttcaagcaattctcctgccttagcctcccaagtagctgggattacaggtgcatgccaccaggctgactaatttttgtatttttagtagagatggggtttcaccatgttgttcaggctggtctcaaactcctgatctcaggtgatcctcccatctcggcctcccaaagtgctgggattacaggcatgagccactgagcccagccaaagtagtgtgactttaaattgcttaaactcttttttttttgatggagtcttgctccgtcgcccagggtggagtgcagtggcacgatctctgctcaccgcagcctccgccgcctggggttaagcctcagcctcccgagtagctagaactgtaggcacccaccaccatgaccagctaatttttttttgtatttttattagagatgaggtttcaccatgttggccaggctggtctcgaactcctgacctcaggcgattcacccaccttagcctgccaaagtgctgggattacaggcatgatttccatggcacccagcctaaattgcttaaactcttagagcaagtatctcttctgtaaaattgggataattaaatctgctacaaagtattgtgtaagaactaaaagagataatgaaattatggctcctccctagcacagtaggttttaaatatgtgttatttctctcccccttccccatttacctctgatggaaacttagttgacatctttgaagtgaagtggtttgttggtcagttcttagtttctgagttagctgctactctaagccattgcacagggtatttcttttgactcaagataaaaatgaactgtggaaaaccttattataatatagttatgaagaaggattatttattttcacatgatagcccatagtaatggtgttttgttgatcaggttacaatagattaatatcattatataacaaatgctcttttttccctgttcttttcatagttgttcaatttaatgagaggtaattgattaaattctgtttgcattgtagtcaggaaaccggagagggcagcaaactgtaggagattgtgccccaacgccccacccaggcctccctatcaagacttcacctccactaacctgtctcagtcatttctaacagaaggactcatgtaaattaccaaattactcccaaataaatcagtgtccagaaagatttagttgtttatggaaaattggtagaggattgaaattgtatgacactgttattcatctctcctggacaaggaaatacgaaaaaaaaaaatggaggcattggttgtgttctcgtatactgagaacctcactccctgccccatttctaaaggttacaattccatcttctctttagttttcatcaaatagttttgccccctgtacatcatttttattaatattgataataacaaccaacatcaatcaaatgctttccagagtcaggtacctcactgcattgttactattttctcgttttgtggatgatgacatggtttggctctgtgtccctgcccaaatatcatctcaaattgtaatccccacatgtccagggagggaggtgagtggatcatgggggagtggatcatgggaggtgagtggaacagcatccaccatgctgttcttgtgatcctgagtgagttctcacaagatctgatggttttataagcatctggcatttcccctgctttcccttctctctcctgccgccatgtgaagaaggtccttgcttccccttcaccttccgccatgattgtaagtttcccaaggcctctccagccatgtagaactgtgagtcaattaaaactctttcctttatgaattacccagtcttggggtttttcttcgtagcagtgtgaaaacggactaatacagatgagaaaaccaaggagtgagacaacttatgtaatttgctcattgtcactgctatagactgaatgtttgtgtccccccaaaattcacatgttgaaatacccaaatgtgacgatattaagagacgggatctttgactggtgattagatcatgcgggttaagttctcttgaatgagattagtgcccttataaaaaaaactccaaggagaccccttcctcattctaccatgtaaggacacagagagaagacctctgcctgtgactagaaaacacgctcccaccagacaccaaatctgccagcaccttcatcttccacactccagaaatgtgataaataaatttctgttgtgtataagttatccagtctatggtattttattctagtagcagcccaaacagactaagacagtcacatagccagtgagtggtggagcccagtatcaaaccaggttattctaaattctggagcccacacttcctttctctaatggcataaatggaagctagaaaggcaggaatttagtaatcttcaatgactggctttggcctaatttgttgacctgatatttgcaaattaccataggctaatttaaatctgcctttgtaacttctgctgtgtccagtatcagtttaccactctggtcattctaaattattttttccctgtaaaaaattatttcactttgcctatctaaattcaatccatcttttccatgaaggcttccccatctgcagagggacttcattctattacagtcctatatcactaattattgtattacatgacagacatagctttttttatagtctgtaacctatgtatgtgtgtgaaggagacatcagtgtttgagaaacagcagtgtttggcacatggctaattctggtatatgtttgcctacttccttatcctttagcttgcacactagaaacagacacacctgttttttaatcctagcagctctatttctagctgtaggtatcgagtcaaatcacaaaacttctccatattttaattatctacaaaaaaggaataattatggtatctagtttattgatttacagtgaagatgaaatgagattttgtgtttaggacatagtgaatacttattaaatattagctgccactattataacttctttttttttttttttgagatggagtctcgctctgttgcccaggctggagtgcagtggtgcgatcttagcttactgcaagctccaccttccaggctcacgccattctcctgcctcagcctcctgagtagctgggactacaggcgcctgccacaacacccggctaattttttttatatttttagtagagatggggtttcaccgtgttagccaggatggtctcgatctcctgacctcgtgatccacccacctcggcctcccaaagtgctgggattacaggcatgagccaccacgcccggcctattataacatttttagtaaatattcattgttatagattatttgtattactagattacaaaatctgtaatcccccttatgcacattataagcatttagtaaatgttgagttttttgtttgtttgtttgtttgttttttgttttgaaacagagtcttgctgtgtcacctaggctggagtgcagtggcgcgatctcagctgattctcctgcctcaggctgctgagtagctgggattacaggcatatgccaccacgcctagataatttttatacttttagtagggacggggtttcaccacgttggccaagctggtctcgaactcctgacagcgtgatctgcctgccttggcctcccaaagtgctgagattacaggcatgagccaccacacctggcctgagttgcttttttaaaataaataaagatttaattcacataccatcaaacttgtcaagttttaactgcaggttttaactgcaggatttaaccaagtgccctgctgtaaactgccagtatataacataatgcaggcatgtgaggtcccattggaaagggagttatccaggctgggagaaaaacttgagagaaatgggcacttgcatgaaatcctattgctgttccctaaacctaccctctgatcttatgaaaaaacgaatatcatgtgaaatgatttcatttcatttgattgttagtgaaatgttttaaataattatttgaatgctttagaaattaatgtatcgttatttgtaattagaattcagttgtgcactctgctcaaaatgagacaaagtgaagcattactcatgttttcaggtaagtatgaaactcttcattttgagtgataacaaatatcggtgaatgcttacaagcacttgaaacatttacttttggttaggtaaaatttaatgtgaatgtgatggcggtggattttagtttcaaatgaggtaaaaagctgaattgttaaagagttgcatctattctttcatagtctggaatctacctcaccctcattctttgtggtgagttgcaaatgaggcagcaagatacccagcatacctgttaagcaagtatttatgtcccactggtttttctttttttagtttaatgctaggttttttttttctttttttgaacaatctgttttctgaggttttgaattttcctagcaactgctaggagagataggaaggataatgagctgaatggctggtattcaacacaagaataatggtgttctttatttacctttgcataattttaaagagaacaagtttacttatcttttacttgttcttttcccattgtaaaaactcagtaggtgttactagactattctgaaatacaaattctgaaaagctttcttctgatatttctatggtttctcattcatattttctcttttgttacctcacttagagcacatgggctttgtaatgtacactgctaagagtagatagaaacctgcttggaatattgattttctgtaattaagaatgtatttatagaattttatctttcttatagttctattttttttttttttaagaggcagcatcttattctgtcacccaggctggagtgtagtggcacaattgcagttcactgtagcctgaacctcctgggttccccgcaaatagctgagactacaggaacttgctaccatgcctggctgatttttcaattttttgtaaagatgtagtctcactatgttgcccaggctggttttataatactgggctcaagcagtcctcctccctcagcctcccgggattatgagtgtgagccaccacaaccagcctttcttatagttatttatctcactgtgaacactgtgaacattttgtcattttggagatccttaacattgagtcatgtatactttgtgaatgtttgcatagagttacctaggaacatctggaagaatgttcatgaaagattagaggagggccagtcatgcaggaggaacagtttctccagggtgctacccatctatatgggggttgcagaagacctttctgccctctaaaccatatttcctttttttatttctttgagacagagttttgctctgtcgcccaggctggagtgcagtggtgcaatctcggctcactgcaacctctgcctcctgggttcaagcgattctcctgcctcagcctccagggtagctgggactacaggcacacaccaccatgcccggctaatttttttgtatttttattagagacggggtttcaccatgttggccaggctggtctccaactcctgacctcgtgatccacccgcctcggcctccaaaagtgctgggattacaggcatgagccaccgtgcctggcctaagccatatttctcttgtagttgttttgtctttctttctgtctgatcttgattttatgggtgacgtgatgagaatattcaacaagtagaatatgagatataggaaaaaggtcttgactgctactctcctgagttgagataattttttttttttttttttccgagatggaattctccctctgtcgcccaggctggagtgcagtggcacaatcttggctcactgcaacccctgcctcccgggttcaagtgattctgcttcagcctcctgagtagctgggtctacaggcgcgcgccaccacgcctggctaatttttgtatttttagtagaggtggggtttcaccatattggccaggctggtctcgaactcctgaccttgtgatccacgcacctcgtcctcctaaagtgctgggattacaggtgtgagccactgcgcccggtgaggtgagataatttttatacttgctgctttgactgatgtataaaaaaatgctactcccataatgcaactactttgctgcattggagagaacacaatagaaaaatagccacttcttattcaagcttttcttgatttttgtttcggctgtctctaaatttgacacttgagaatagatggtttatttgactcatagtatgacccaggtatgcttttgttaaaaagaacagttctaggaggatgactgttgggacaaaattagctactagtatggaatactctttcagtgtaaaatctcagaacaacatttaaaaatcattggagatattttattcataaacattttcttaataagatccagaaagggtttataaacctaataaacctattcgataggttctatcaaataaacctatttctatcaaataaacctatttgatatcttctatcaaataaacctatttgataggaggaaataggaataggacacattgcttttgactttctatacccatgtggaaaccaggaatctattctctccctctcaatttacatgaccatgaggaaactgaaacctagcgaagttaaatgacttgcccggggacggacagctagctagttcctgcttgaactgaggaccatctatttggttaccgggagtgtggctggtttctgttgcctgttttgatactcttctcctggtaagttttagcttcaaatggtattgtccacaccacagcccttgatctcaggtaattctccacaccactgcctttttttttttttttttttttttttccaatgcagttgcgtggtgtgaaggcgataactgcagacactcaggtgtaaacaacccagggaatcaatgggttggggggatggtaaaacaggagttcgtagacaggactgtgtacaatagcttctgaagttttggagggtattggtgtagctgttatttctgagaccggagaaaatgacggtagagtgacagtttctctaatcatcagttttcaaagagtatgtttttcgttggaaccacaaatatagtacacttaataaggggaaacgaaaccttgaatttttccttcccagactctgaaaagtaaagtaaactttaaggaacattttaagggtgacaaaaggtgaagattgcaaatcaaacttagagtgtccctgctcaagaaaatctgtgcactgcagctacaatagaggaccacttgggtttagaaatgacatgttattaataattctagtcactgtggctaattagaacaatctgttgaaggttataaattatagaagctttttaaaacatttatctaagaacctgtgtagaattctaaaaggactgaattatttgaagttattagtttctgtgtatgtaaacttaaactatttttaaagcctttgattatttttctaaaaatgtttttgcatgcttatagcctgatgccgtaaatgttttatgagtttaatgtacagcacctctaggtgctatttaaaattgttttttctggtccttttcttttgggttataagggttcttcgtaaccaagaagattacctatggttacgctgaatgcactctcccagggtgcataggcgctgctgaactgcggttataactcttgtttgcccctgggtggttgccagcagggagtaaggcattgtgggaagtactttctttaccttccacaacaggtgtctttgtcagtgcaccttattcagatatccatgtgtggaagctctgagtcactgaatagcaaagaaaaatatgaaagcaagaggaattgctttcacatctagaaaatgttgcaagataatctgaaatcttctggtgctggtgaatgcatgaagaggttcacagtatcttttaaagtacttctgaaaagataaggagtttaaaaggtatgaactgcctggacaccttataatgccttgtctcctgattatcatttaatttttacctggttagtcagagtcaggataaatgtgcaggaaaaaaatgttaacgaaaataatgcttaacagacaaagcagcactgtagaacaaaaatgaagtaaaaatgctttactgactccaacaagggtcaaacacagtttgaagctgttttaatcttgtggatttatttaaaatattgcatttttttgtttaaataagcttattagatttgcttgtttcctagcaatcaggtgcttttccctccttccttgtgctcgctcttataagctagaatgctatagcagttgtaaaactctactaattacatttaaatgggacaaggtgttatacaagtaatcatgttaatgtagatgaaaaaaatacttttggaaaacatgggaaaataacactatagatctcattctgagttttgttttctgaaaagcaaacaaatttaggtaacataatcctgctattggtaatgaagactaaacatttcaactggttgaaatgttttatttcaacttatttcttttgattttagacgaacttgccaaattaatttctagttctaacaaagaatatttctcatagtaagtactgcagtgtcatgatctagaaaaagcagggaagatactagcttaattaggaatattgaaaaacaacttcagagaagccttatctgtcttccccttatttttatttgcttaatcctttttccatgaaattagtatacattatatttcctgatcaagcaactttgtaatggtgattatgggcaactttcaaacttttcatctggaaatatggcagttcatttatggtctccagctgtaatttaaaaagcactactggtggttaagctaccaacagttaatggctatctactgatttgaataattaaaagaaacccctagccttaaagataaaagatgaagagaacttttatctatgggagcaaaacaaccagtttataaatgagactcttgtattgctttctgaataacaacacaaaactatgcttaaaatacttattttttttagtaggaaaagggagtaatgattattaattgatatcgctgtccctgtttcatttttatgttttggcatttttttctttaacagaaatactcagaggggaaaattttttttttcagacttcaggagatcacttgtactatgaattctttaaattctgagaaattaaaatggttttcatctgtttattttctaagattacgaaaaaataagcgttaagaacactaagaaaatttacttcttctccaagaacaatcttcatgtaataatactgcagtaagaagatgagctattatgaaaatttttaattaccaagaacataacacaaatcagttttttttgttgttgttattgctataggatatttctagttaggaaactttatttcttttttgaagtttaaaggtttccaaaaattgaattttccagcttctctgttataaatgcagaaggtgtttatagtgtatacttcctgcatagataagaaacctcttttagtttcctactgggggtgaattgctagccaagcctgtgatagcagccgctttttttttctttctctttctttctttctggatttttgacactccaccccctcgaactcaggtgggtgtgtacactggcactgagctgcagtaggatttttccttggatagtctggtctggagctgggacagcagctgctgctgtggaaaggccagctggcaagatgatggaagaaatctccattatggtagcctatgacgcccatgttttcagccagctgcacgatgaagacttcctcactagtctggtggccatcagcaagcccaggtctatggtaggtggtgccttgcacactactctggttctgtattttcttttctaacatgatatctatactcctgtagcaactgaggcataacttgctgttggctttgtgttatgtctacaggttttcaaagatttatttacataattaaacactcatataacagtagcacacttaaaatgttaggctgatgctttcatatataatgaggttgagaggaattttagagtgccaaatatcactttgtcttaagtttctgccttgtaaatatgtatataattatcaggtaggggctagttatatttacatagcatacaattgaggctcatagaagtgtaacgtttctaccagtgagtaataacatcatctgagaattgagctacctaaacatcaggtaactttcagggtcttaaattattactaagaagaactattaggaaaataacagtacaattttagtttggctttaatatttgtaaaaaaaatttgccattctctcaggatcttagtgtgtgtgcatgtcctggcataatcaaaaacggaagttcttgcaagtgtttattgtttcttctcttagatgtcatcattataatggctattgagtttaagatatcaacgatctatacctctgaaaccaacttttttttgagatggagtttcgctcctattgcccaggttggagtgcaatggcatgttcttggctcaccgcagccgttgcctcctgggttcaagcaactctcctgtctcagcctccctagtagctgggattacaggcatgcgccaccatgcctggctaattttgtatttttagtagagatggggtttctccatgttggtcaggctggtctcaaactcctgacctcaggtgatccgcctgcctcacctcccaaagtgctgggattacaggcataagccaccacgcccggcccccaaaatcaactttttaactacaattgtagtaacttcttattatatttaatatgactcatcacaaacaacagaatgaaagagtatatcataacatttaaacctaactaatatgaagacctacttctctattttaaggcacaggaaccttaaaaacatggctatttcttgaaacaacaaattacaaaaaataaaaataaaaaaataaaggagaaagctatagattgattttaaaagacttaagggttatatcaaccagatgcaataaatcaacgttgtttaaatgctaatttgaacaaagtataaaaagaactgtaagataattgagaaaaatttgaatttgaccactcattaggtatttaataatgatattaagagaattatgtaattttttgtgcattgtttttttttttttttttttttttttgacatggagtctccctcttgttgcccaagctggagtacagtgacacgatttcagctcactgcaacctccgccttctcaggttcaagtgattctcctgcctcagcctcctgagtagctgggactacaggcacctgccaacacgcctggctgttttttttttttttttttaagatggagtctcgctctgtttcccaggctggagtgcaatggcacgatctcagatcactgcaacctccgcctcccatgttcaagtgattctcctgcttcagcctcccaagtagctgggactacaggtgcacaccaccatgcccagctaatttttgtattttagtagagacagggtttcaccatgttggccagggtgggctcaagctcttgatcttgtgatctacccgcctcggcctcccaaagtgctgggattacaggcgtgagtcacggtgcacagcctttttttttgtatttttagtagagacggtatttcatcatgttggccaggatggtctcaaacttctgacctcatgatccacccaccttggcctcccaaagtgctgggattgcaggtgtgagccactgcacccggctgatactatgatttttttaaatggtcatttagagatatatattgaatagttttggatgaaatgtctgcagagattcaaaatgaaccagtagattatgtgttgataattattgaaactgggtgataagtattaatacatagtgattcattatattctctccacttttgtagagatgcagtttaaaagaatcagctggaagacaaaaaaaagcaaaaagatttgcaaaaagcaaaacagatataaaactgtaatataatcaataaaactgtaatatactcagccaggtgtggtggaccactcctgtagtcccagcacttcgggaggctgaagcaggcagatcacttgaggccaggagttcaagaccaacctggccaacatggtgaaaccttgtctctactaaaaataacaaagatcagccaggcatagtggcgcatgcccataatctcagctactcaggagactgaggcatgagaaatgcttgaacccaggaggtggatgtcacggtgagctgagacagagcaagactctgtctcaaaaaaaaaaaaaggaaaaaaaaacaccataatatctttctggaagtgttaatagagaaacatctgacctgttgcatgctttccttgtataatatacataatttatgtttttataattacatatattatatgaagattattgccaaccccctagttaactacaatatacactataactgaatcaggataggataatccacggttgtagataatctttaaattttattttagtcattgattttacaatattccaacatgaaagcttatccagagaattcagaatatggccacgtgctgtgactcatgcctgtaatctcaacactttgggaggccaatgcaagaggaagaggattccttgaacccaggaattcaagaccagcgtaggcaacatagagagacctcatctctacagaaaaaaaaaagaggatcttgagaggaccatcataaataaacagaattctctttttttttcttttctttctttccttctttctccctccctccctccctctcttccttcctccctgcctctcttccttttttgagacaaggtctcaccatgtcaccaaggcctgagtgcagtggtgtgatcatagctcactgcagcctcaaagtcctgggctcaagcagtcttcccacctcagcctctcctgagtagctgggactacaagtgcacatcactgcccccggctaatttttttttaaagaggtagggtcttgctatgttgcccaagctggttttgaactcttgggctccagcaatcctcccacctcagcctcccagagtggtgggattacatgtatgaaccatcacacccagccaagagcctcttaagaggtctgagctgagtcttcaaaaactaacaggagttttctaggccaaaggagaaaagaaacaaatacagagatgtgaagcagcagagtatagaggacagtgatggctgaagaggtggacagtgaccaagtcatagggaacatcctatgctcaataagtataggacgttgtgtgtttgtatgtgtatggacgcaggcacataagagactgggagggagaaaaaaatgaatgaattaatataaatgtgcttatcaggaaacactcttccatttgtagattgtgtgtatattatggctcaatgcaaccctagctgcaccaaagggaattcccactcctaaccctgtagctcatttttaaatagaatttgttgactaatatggaaaagccttggagttctgatagaaacacataatattgttttatatatcaaacttttaaataatgcagatcttggggtattataaaactttctgaagatatttagttttatcagatttgaaatttaaaatcgtcttttggaggtaatatttgggtttggttcatctggaaaagttattctaaaattgtgcaagataaaaatatatatcatttgcttttttttttttttttttttttttaaatatggagtctcgctctgtcacctaggctggagtacagtggcacgatttgggatcattgcaaccttcgcctcctgggttcaagcaattcttctgcttaagcctccccaatagctaggattgcaggtgctagccaccatgcccagctaatttttgtatttttagtggagacaggatttcactatgttggccaggctggtcttgaacttctgacctcaagtgacccgcccgcctcagccccccaaagtgctgggattataggtgtgagccaccatacctggcctcatttgcttttaattccatgttgaattttttgctttgagatgaacattttttcatcaaacattttgtttttttgttttgagatgcagtttcgcacttgttgcccaggctggagtgcaatggcatgatctcagctcaccgctatctctgcctcccgggtccaagagattctcttgcctcagcctcctgagtatctgggattataggcatgcgccaccatgcctggctaattttgtatttttaatagagacggggtttctccatgttggtcaggctggtctcgaactcctgacttcagttgatctgcccacctcggcctcccagagtgctgagattacatcaatctgataactgcactgtgaagcaaattacactcttgctaacttataaaatcctccttaggtttgggttcattattaagggtatttagaaactttcttagtacaggcttaattaaatatctttctgtaattggactttgttgcataatgggaggtgttttgattccttgaatggtaaaaatccgattaaatacagtggttctcaggtgtggatactgcatttttttcttattcataagtaaccctgtgtctttcttatgtttttggtaggaatctgtagtaaaatataccttgcaagctgttacatacacaaaactgaaagaaaatttgactaaacaatacctgctgttgccacatgttatgtatgaaggggatttttctgttttattcaatcgtttaaaggctttaattgtttatgacccactaaattgaattcagaaatctctctatccacactttggaaaatatgattatatcctattgagtccttaaaagtaaatgttgatgcaagaaaatcacagacccctttacataaattacagataagaaaaaacaataaggaagccaagcataacttcttatgtcttccatatcatacacacatgagcaaactaagaaattacctagaccaatattgtttactgtgataacctaaacaaaagcctagtcactactagcagaacataagagcttttttttttttggagacagagtgtggctctgccacccaggctggagtgcagtggcttgatctctgctcactgcaacctccgcctcccaggttcaaacaattctgcctcgtccttttgagtaactgggactacaggcacacaccaccatgcctggctaatttttgtatctttagtagagatggggctttcaccatgttggccaagctggtcttgaactcctgacctcaggtgatccacctgcctcggcctcccaaagtgttgggattacaggtgtgagccaccacgcctggcctctactgggggttttaaagttacacagttctcagttcaagttttagattcgctacttaccagtgagctaagtaacttctctaagccttggttttctcatctgaaaactgagagacataatagtattacctcattggaataccatgaggttatttgagagcacttgtaaagtatttagcacagtgaaagctgtaactaattgtctccttttctaataagggaggaactaatcagactatttgaagaaggtctaaaggaagaagtgggatgaatagataaggcaccctggagacgcaggaggagttgggaggacaaaaggagaaaatgaactagttgggttaccctggagaattactttgcttgattagggaatcactatcaggataccagtcctacaggaaacttgaagccttctgccctgaagatggtgctgaagatcttaggtttgagctcagaagggtgggaaggcaatgtagaaccaatagaagggagtatatataggccaaaccttctgatgagtagatgagatcaaattactgcagcaggaatcttgcagtaatgaactggcagggcccacattgaccaaggaaaaaaattgtaaaggacattagagcaatgcaagtaaaaagagatgacaagtgtctggacttagacacttgacagtgggagtgtaaatagagattagtctacacatgttggttagttctcacaaagggaatatacattaatattatttaggaagaagcagcaactgatgttatgagaagagtaaatgattgagataagttgaaaattaagttccagccatacaaaagtggagattgctatagtgtcaaaagtctttgggaatgggaaagttaggttatcaagaatagaatggaggaaaaatgacccattctggctttaccatgttccacatctagaaattcaaggtcacagtatcacggtaagagaattgattgtccagtggttagaacactgccctttaacaaaagccatttaatcagactaacacatggctatactatattggcactggatagatattcttcactgacagaaaccaaaatagcagcactgtgccagcaaaggaagggagctctttcttggagctacagtttctctttctataaatgggagacgagggtaagcattctgtaattacttcctccttatcggattggcacagatttcatcaagcatgccaaattaaaaaacaaaattcagagcaattccatatgtcagagatggagaaaacaataaaatcaatactgttatttctaaatctttactagatatacatttcaaatattgattagaataaacataacaattaagattcatccatattttttaaaaatgttatctgaatattttttattctcattgttacatagcaagtgcacattttggcactatatcaatttcagttcagttcaagcatccaaccaatcatttggttgatcagttctaatgagttaaggttcttatagttgcaagtaataaaatcttgtgctatcttaaataagaaagggattttatcacgtggacagcaaagtgtgttcctttaaatgcaagggcagttcatctaggcaacagagctggtactggactgatgctggcaaccattctccctatctcttgccatctaattaaaacttctctcttgacatctactttatttctctgtctccaacttcttggcttctttatttctatggcagaatattgctgctacacagcatccagatttatagttctaccatctgaatcacaactccatatttctttggtgagaatctgaccgagtaatgttaggtgagttttgtgatagtatagagcagagcccctgagcacacactcaaactaaactgcctgggtccaatcctacctcacttgcaattagctctatgactttgggcagattacttaatctcaaacctcatttttctcatctgtaaaattggagtctgcaagagaaagtagtccggactgaaatcggccagaagtccctctcatgttatatctaaagtaaacctatctttaactgccaagctgtgtttcgtgtttctttcctctttctttaactcttacagaatcatgttagtagtacctgtaagattaaatcaaaattaagtttaaatttaaattaaatcagtaatatatgtaaagcacttaagaaaattaattgtcaatatatgtaaagcactggatacctagcacatagaaagtggcatgtgtatgttagttattattccaaattgattcttttattatttatgaatgaatgagacaaggtctgtcgctcactgctgcctcaacctcctaggatcaggtgatcctctctccttagccttccaagtagctaggtgtacaggtgcatgtcaccgtgcctggctaattttttatttttgtagagatggggtttcactgtgttgaccaggctaatctggaactcctgagctcaagtgatcctcccccctcggcctcccaaagtgctgagattacaagcgtgagctaccacacctggcctggttaacagaaatttaaaatgatgattaagaccaggcgtagttgctcacgcctgtaatcccagcactttgggaggctgaggcgagtggatcacgaggtcaggagatcgagaccatcttggctaacacagtgaaaccccgtctccactaaaaatacaaaaaattagccgggcatggtggcgggcgcctgtagtcccagctactcgggaggctgaggcaggagaatggcgtgaacctgggaggcggagcttgcagtgagccgagatcgcaccactgcactccagcctgggcgacagagcaggactccatctcaaaaaaaataaaaacaaaacgatgattaaattattagagaaaccaattttttttttttttttttgagacagagttttgctcttgttgcccacgctggagtacaatggcatgacctcagctcactgcaacctgtgcctcccaggttcaagcagttctcctacctcagcctatgggtagctgggattacaggcatgcaccaccacgcctgggtaattttgaaattttagtagagagagggtttctccctgttggtcaggctggtctcgacctcccgatcttaggtggtcttcccgccttgacctcccaaagtgctcagattacaggcgtaagccaccgcgcctggcgagaaaccaatattacatcaaaactcaccacagtgcgcaagctgaacgtgtaatcaaattgtagtactcaaactcattgcaaggacttcaagcttatttacaaacaggatttacagcaaacaaaacagtgtagccctgtaattgtaatgcccacaataggatttctggcaggctgaaatacagaagccctcttatccgacacagtcagggctgtagttggtttatagaaaaagttggttcaggagaagaaggataaaaattgctacatactaacttaaacatttgtttttacttaaaacttccattatcaattttgctttaaggcctttaatgctctttgtttgcttcggaattctgaaatccatatgccttctagtttcagtttccttaagaggggcagtaaattaataaatgtgtcaagcagtctaagggcaaatttgatagagattttcataacttttttctttacattttttatggcagcattgccaccatttaattcttttttttttctttttttttgagacagggtctcattctgtctggcgtgcaatggcgcaatctcggcttactgtaaccttcgccttccaggttcaagcaatcctcttgcctcagcctcctgattagctgggatttcaggcatgtgccaccacgcccagctaatttttgtatttttagtagagatgggatttcaccattggccaagctggtttcaaactcctgacctcaagtgatctgcccaccttggcctcccaaagtgctgggattataggcgcgagccaccacgcctggcctcacgctttggcttttgtccatgttccattgaccaaacaaatcaaaaggccacttccaacatcctggagaagaaaagggtactccacaataggagttgtgggaggggaaagtgagtatttgctgaacaatagtctaccacatatataattgacctaactgacccttcatatgatcaccatggttaggttagctgtgtaaaatatataagcactgtgtttctcaatagtacacttatataatattcacaaaaattgcacatgcacagattcatcatcaaaaaatgacatatactcattgaaaaatgagataaaattgaaaattcagacttaccagtcttttaccattattcattttactggaaactttaaagtgaattggcactcttttttccccatcccttccaaaggtaattaagaaacagaaatctcttgccaatgtttctagggtatgccaacattgttatctcaacctgatccatatttatagcccagggatttgcaaaaacttggggggggggtcatggattcctttggcagtgtagttaagtccatggaccccttatcagaaaaaaatgtttttaaatgtgtaacataaaatagataagactacaaaggaaatcaattgtatttaaatacaattactaaaataggccaggtgcggaggctcacactgtaatcccagcactttggaaggctgaggtgggctgatcacttgaagtcaggggttcaagaccagcctggccaacatagcaaaacccaatctctaccaaaaaaatacaaaaattagctgggtgtggtggcatgcgcctgtaattccagctactcgggaggctgaggcaagagaattgcttgaacctgggaggcagaggttgcagtgagctgagatcacgccactgcactccagcctgggggacagagcgagacttcatatcaaaagaaaaaaaaaatacgattacaaaaatagacagaaatcagatttatgatatggtaataagtacttctttattaaacacattaaatagcaagaaatggtagtgaggctactataaatgcaaaataattttgagatatatgtaatacatataatgtgaatgaaaatatctgtggtatctataggtggcaaaatcacaaataacacagtggattattggctacatttataatggaaggaattgataaatttcagttagaggttcaggaaaatagtttttttccatctaagttcaattcaatgaactccctccacatacccctaatataacctttatctgatactgtctgagacacaaagatttttacaagtcttttctttccttacagtgggctaggagaaatcttgatcatgccttccactttctctcttcctcttaatggtatagaaaattacttgtgtgattatttaatgaatctctcattaacctataacttccctatgtcagctttttttattttggaaacagaatctcactgtgtcgcccaggctggagttcaagtgattctcatgcctcagcctcccaagtagctgggattacaggtgtgcaccaccacgcccagctaatttttgtatttttttagtagagatgaggtttccccatgttggccagactggtctcaaactcctgacctcaagtgatccacccaccttgcctcccaaagtgctgggattacagacgtgagccaccatgcccggccagctatttctgtttttaccattgtatttccagcccagcattgtgcctgggggaattatacacactctgtacatatttaatgaatatattgggggaagatgaaatcccacatagttacaatcataatcttcaatatgtttgtgacaattaaatacattcatgtgtgtgtgtatgcataagatatggaatttatttttaaatctttttatccttagacccatatactaagttcttatgattgtggaatcaggttagagtctagctgagtacttaattagctcttttgttttctttttttgaatttttgttttattttttaattttaattttaactttttttttttttgagatggagtctcgctctgtcacccaggctggagggcagtagcatgatctcggctcacttcaacctccgcctccggggttcaagccattcttctgcctcagcctcctgggtagctgggactacagatgcctgccaccacaccaggctaatttttgtatgtttagtagagacagggtttcaccatattgggcaggctggtctcgaactgttgaccttgtggtccgcccgcctcagcctcccaaagtgctgggattacaggcgtgagccaccgcgtccggccctgttttatttttatttgagacaggttctctctctgttacccagtctggagtgcagtggcgtgataatggctcactgcagcctcgaactcctgggctcaaatgatcctcctgcttcaacctctcaagtagttgggattataggtgcatgtcaccatacctggctaatttttttgtttgtttttttttgtagagatgggggtgtctcacattgttgcttaggttggtcttgaacttctggcttcaagcaatcctcccacctcagcctctcatagtgctggggttgcaggcatgaaccactgtgaccagcctttctattcttttttgagatagtgtctcttactctgtcacccaggctggagtacagtggtgcaatcacggctcactgcggcctcaaatgcttgagtccaagtgattctccctcctcaggctcccaagtagctaggactgcaggcacataccaccatgcccagctaattttttccttttctttttctttttgtagagagggagcctcactatgttgctttggctggttttgaactgctgggctcaagtgatcctcctgccttgacttcccaaagattacaggtgtgagccaccactcccagccttaattagctcttaactgtttcaaaaatcaaacaaacgaacaaaaaaatgcagtgattatttctgttatacttttatttagtggttcatttaacatgtatacctcctacgtgcatagcactgtgttaagctttgagacatcgtcaaagagataacagtccagtttgggagacagccatgtaaacagccgtgtatgagtcagtgatgtgagcactgttagaaatgtgtaggtgctgtttgtcctatatgctcctgtcacaccttgcaccctgtgaactaactgaaatgggatattctatctgcttttctgagttgtacactgaagttcattttccttgtgggttgttttatttcttctctctctccctaccatagtacctggcacatagtgtcagcagccagtaaggttctaattattgaataaaggaatggtggagataattagagatattttcataaagatgtagacactttttaaagtacaggttttgatttttaagctcttacaattttactttataaataatacatgcacacagtatcagaatttcaacaaatatgaaatgatatccagtgaagttacctacccattcctgttttcccagcagttttagtagttttttttagaagtatccttctataaatatttttatacatgcaaacaaatttatatgtgttctcttttttcagagctcttggtggcccttttatgttctgtactttgcttttctcacttaacagtatgtgttgatttttctatgtcagttcatgaagggtgtccttgttcatttgaaagctacatagtatttcactgtatagatttctataatatgtgtaaccaactccctcccactctgtgagtgtgtaggttgttttcaatattttgctcctacaatactgcagtgagtaatcttatataacatttcacaaaagtgtgtgagtatatctgtagattaaattcctaggagtggaactgctgggttgaaggatacattcatttgtaattttgatagataaggccaaattgttttccttaaaggttatattagttaatataactaccagcagtgtatatctgtgcctatttaaaggtggaaacttttgaacaggaatctaagaaaaaataggaatttatcagattgtcaggggacgggaaagatgttccaggcagaaggaatagcactttgagaggcacgggatagaaagatggcacaagaggatttttaacttattccatctggctaaaatgtagggggtaggccaggaaatagagagtgggagttgatcatgataggttgtgtatgtaatgctgagtaactgatattttaaattctataaatgaaggttttgagtagggaaatgatataataaggttgattaatgtattttattaaaagaatagctatttgtgtgtatttatttaaattgaagtttgccaaaaaggtgtagtccctaaagatttttcttgctttttttgtttgtttatttggagacagggtcttactctgttgcccaggctcgtgtgcagtggtgatcagatcatagctcactgcagccttgaaattccaggtttgatcctcccacctcaccctcccaagtagctggtactacaggcacatgccaccatgcctggctaatttttaaaacattttttgtagagatagggtctcgctatgttgctcaggctggtcttgaacgcctggcttcaagcaatcctccagcctcagcctcccaaagtgctgggattataggtgtgagccaccacactcagccttttcttggatttaaatgaggttttctttttactaaggattcaaataatatgttgactatagaaaattttgaaaacacatagaaataaaaactgaaacacagaaagaaaatacagaagttactcataagtttactactctgaggtaatctccctatccaaataattcctgttgtctataaaacaataaaagaaaatcaatatatgtattaggtgggttagaaaatacaaagtgggccacagtccgggtgggcatggtggccgcagcggtagctggagcctctgcgactacacctccaaccggcctggagcccgtggcttccctggctcctgcaagcatctcgcgtggtggctctggccagctccagcactcgggttgggccggatgaccagaggcctgtagctaccagctgccctctcccgcctgggctcagccgccacccgtgagcgaactcagcccgggacacagcacacttatcaagtgggtcccatttttagccacttgctatttcagccattgctgaaaagtctagtgggaaggaaccaactggagagtcagagggagaaattagtttctatttccagctccaccactataatccctggttgaagaaatatgaatatcaacacgaaattgttcatcagcgttatttgtgccagctttttcaccttccagcttcttttctactttgtaagttactggttttcacaaaagtttctccaagtttcaatagtcttagctttgaaaagaagattgaatggaactcaagggtggtatttacatgccattctttggtggttggtgttcttggcctgtacattttcttatttgatgaggctgctaaagctgatccactttgggatggtccatcacttgcaaacgtgaatattgctattgcttcaggctacctcatttctttgttttctttcttttttttttttttgtgatggagttttgctcttgtcgcccaggctggagtgcaatggcatgatcttgactcactgcaacctccgcctcccaggttcaagcgattctcctgcctcaacctctcgagtagctgggattacaggcgcccgccacctcacccagctaatttttttttttttttttttttttttgtatttttagtagagacagggtttcaccatattgtcctggccccgaactcttgacctcatgtggtctgccagcctcagcctcccaaagtgctggggttacaggcatgagccaccacgcccagccaggctacctcatttctgatttgtccattatcattttgtattggaaagtgattggtgacaaattttttataatacatcattgtgcggccctgtgtgcatactgctttatactgatattagtgaataagaagtttaatttggcataatttcttcaagaatcagatatatcgaaacatctctccagaccacccatttggaatcacgatataaataattataaatgttttaaaaactgcttcagttctcttggccactgaaatcacaggcttagcctggctgtgcgtggattggcaagctgaatgtttaattatgtggggtgactattattttctctttggacttttatgcctttaaaataaaataaaataaaatagaaaatacaaagtggtttccaaagacaatcacttgttaagagattcttgtgattcctcctaggaagaaagaaaaaaacaaaagtgatgcatatacctgcataaattacagcataattgttaatgtagagctgtacaacaaatatcttctctttaaatatacgaatgtcttttaaagacagaaagaactgttttattttctttgagggcctcactacaagccttttagatagatccagataacatgttctactttccctctttgcaacacttcgctagcaggtacttcctaatcaggatcttgacaactatcagccacatagaatacttggaaggaggttaacttttcatactcaaaagctctcttctggaagaatcctaatattattaatagcaagtcttccacttgtagggcctgttggaacagtttgtgacaaatccttcccagactgttctttgagtatacaaattaatatctccaagtcactgatactctgagcacatgcatcctgctgctagggaagtgcattaaggtaccttcaaaaccttttttcctctgtaattacatcctaaaaattacactggagggtgggctggggtggagggaaggtcccaggtgcatttactgagctatctgtcaaagtccaccaagctagtagattgtgaccacaattttgataatttcggattccatatctgcaaggcagtgttaaaactacacaatacctgataaatgctagaatgaggataattcctctaaatagttaacatttaaccagaagctctacagtgctctccaacctaacagtcacacattaatttattccttcatgtaaaagaatcatttttattgctgctgcctgaaaggtacaaattgcttgggtgtaggctgctcagcttccttcttactaaagagacaggaaatatatcttccatttaaagtgttaatggcatctataaatgtgtagtccaatttgttattgacttgaactcttcaaagatttgagaaacaaggtttaactttagcactcaagattgttacacaagaattaaatgttttcaatgactaccttttgtagtgttgggaagggtgcaaaaaggaaagagaaggctggaaaataaatatattttatctaagagggcatgactgagttggctaagctttcaatttcatttttctcttaggaaagactttcacctattatgttacaatgtgtgctcacatttcctgattatggatcgaaatggagcttggagcactacatttggtgcaggagaggactgtcgagactagaaccaagttgggttttttgttgtttttgtttgtttgttttgttttgttttgttttgtgtgtgtgtttttgagacagttgctctgtcgccctggctgtagtgcagtgacacgatcttgactcactgcaacctccgcctcccaggttcaagccattctcctgcctcagcctcccgagtagctgagattacaggtgctcaccaccatgcccagataatttttgtatttttagtagagacgagatttcaccatgttggccacgctggtctcaaactcctgacctcaagtgatctgcccacctcggcctcttaaagtgctgggattacaggcgtgagccaccgtgcctggccccaagttgtttgttaacagacacctgccaaaagacgaggacttcctctgaacccttatcaggtcaaaacatggtagatattctactaaaattggtcaaataagtaaatgaaataaatgaatgaaaattattcattctttcaagtttgtttggagaaaataatggaaaccattcaacttgagaataaagtgtttaaaatatttataggctgtacaaatttgaagtgctattagtatcccactattaagtgccacttgttacattcccctagataatctagaaggggcaaacaaataaaaataatttaagacaaaagtaataattccacccagggtgaaatggcattcagcctattctaattctttttttttttttttgcttttggaagtttttttttattattatactttaagttctagggtacatgtgcacaacgtgcaggtttgttacatatgtatacatgtgccatgttgatgtgctgcaaccattaacttgtcgtttacattaggtatatctcctaatgctatccctccccactccccccaccccatgacgggccccagtatgtgatgttccccttcctgggtccaagtgttctcattgttcagttcccacctatgagtgagaacatgcggtgtttggttttttgtccttgtgatagtttgctgagaatgatggtttccagcttcatccatgtccctataaaggacatgaactcatccttttttgtggctgcatagtattccatggtatatatgtgccacattttcttaatccagtctttcattgctggacatttgggttggttccaggtctttgctattgtgaatagtgccacagtaaacatatgtgtgcatgtgtcttgatagcagcataatttctaatcctttgggtatatacccagtaatgggatgtctgggtcaaatggtatttctagttctagatccttgaggaatcgcctcattgtcttccacagtgggtgaactagtttccagtcccaccaacaatgtaaaagtgttcctatttctccacatcctctctagcacctgttgtttcctgactttttaatgatcgccattctaactggtgtgagatggtatctcattgtggttttggtttgcatttctctgatggccagtgatgatgagcattttttcatgtgtctgttggctgcataaatgtcttcttttgagaagtgtctgttcatatccttcacccactttttgatggggttgtttttttcttgtaaatttgtttgagttctttgtagattctggatattagtcctttgtcagatgagtagattgtaaaaattttctcccattctgtgggttgcctattcactctgatgatagtttcttctgctgtgcagaagctctttagtttaattagatcccatttgtcaattttggcttttgttgccattgcttttggtgttttagacatgaagtcgttgcccatgcctatgtcctgaatggtattgcctaggttttcttctagggtttttatggttttatgtctaacatttaagtctttaatccatcttgaattaatttttgtataaggtataaggaagggatccagttttagctttctatgtatggctagccagttttcccagcaccacttattaaatagggaatcctttccccatttcttgtttttgtcaggtttgtcaaagatcagatggttgtagatgtgtggtattatttctgagggctctgttctgttccattggtctatatctctgttttggtaccagtaccgtgctgttttggttactgtagccttgtagtatagtttgaagtcaggtagcatgatgcctccagctttgttcttttggcttaggattgacttggcgatgcaagctcttttttggttctgtatgaactttaaaatagttttttccaattctgtgaagaaagtcattggtagcttgatggggatggcattgaatctgtaaattaccttgggcagtatggccattttcatgatattgattcttcctatccatgagcatggaatgttcttccatttgtttgtgtcctcttttattttgttgagcagtgatttgtagttcttgaagaggtccttcacatcccttgtaagttggattcctaggtattttattctctttgaagcaattgtgaatgggagttcactcatgatttggctctctgtttgtctgttattggtgtataagaatgcttgtgatttttgcatattgattttgtatcctgagactttgctgaagttgcttattagcttgaggagattttgggctaagacgagcctactctaattctttaatctatgtagtagttgcttatatattaaacgtgtgaaaatcgtatgaaatcattgttaattcatactgaaatattcacttacctctgatctatttaagccaagctaataggtttcagcctgtttctgacctcaggagcctggacccacctatgctaagataaaagccatgatgactgtggcaacagtgttgctgacattgtactgaccacattgctgtaagtgtctccatggcacatctgcttctgtagattcagtcttactctgcttttagagactttcccatataacactaaaatgtacttgcctgttagtatgtttgatattcttcaaagggagagaattggcctggcatggtggctcacacctgtaatcccagcactttgggaggccgaggcaggcagatcacctgaggtaagaagtttgagaccagcctggacaacatagtgaaaccctgtctctagtaaaaattagccagtttggttgcaggtgcctgtaatcccagctactcgggaggctgaggcaggagaatctcgaacccgggaagttgaggttgccgtgagctgagatcacatcactggactccagcctggatgacagagtgagactccatctcaaaaaaaaaaaaaaaaaagaaaagggagataattaatttcatttcttcattctcactgacttcaatgaggagatttagaataggaaaagaaaattagtatacgaacaagttgagacgaaacagaactgacataagaagaacataaaaagcagagtccataaatcttgcagtatggtagcctaggtttcatcttaatagcactaatacagacacaaaataaaatgatagtttgatgaggtaagtacagtttttcaggcctgtcttacaggtggtaaatctgaagcacagattaagttacttgttcaaggtcacagtgctggaaaatggtaaagtcaggatttgagcacaggctttctggctctagggctgtgctcttaataattattccaaatgcatggcgtttgtgctttgtactcccttattagatgttacatacaatattcttttgtttatatatccctttgatgatcagaatctgaacttttctaaactgtaacagtttcttaggaaggtgataagttagacgacaaatctataattagagtttcttttacttttggagcatggattttgaaagtgaatgattaacgatgattgacattcttatcagatttttatttactttcttttaactatttggataataaagtaatgatgcttgcctgaataacagcagttctctgttgggctttgtgctttatacatggaaagagggccttggtctattgcaaggatactaaacagtgactgtatagcatgttaacaatgttttaataaatatttttagcaattatgagctaacttaagcctttttaaaatggaatatttattatttactttgtgcctagtaatgtgttagtgctaagactaaaagagcaaagcaaatgccattcctgccttcagagtgcttacagtctagcaggcaagattgatattaaacacatattcaaaaaaagggtatgagttttttaaagagaggtagtgctaaatcctctgggaacatcctctgatctcatctaaatttgaaaccctaggttctctgggaatctatagcaagaactaatccaagttaggggtcagagaagatgtgaagaatgagtaggatttagtcagctgaagagaatgaggctatggggaagcgtgttctaggaagaggagaaatatattcagcctcagagatgtgcaaaaaagaacttaaactgcagagactttcgggagaaaacaaacaaacaaaaaaaccgagcagacaaaaaaaatgcttaaagaaattaaataaatggatcgtagagtgcaaggtgaggagagctcaggagctcaggaggggcttaaaattaggctggagaagacgttaggaactaaattataaagaaccctgctatttatgataaggaattgggctttatgcaaagggcagtggaaaactgttcaaaagattttaagcagggcagtcattaattttgtggctctatcaaaaacattaggccaattatttaaacttgggcaattcatttgatcttcctagttctaaattttctcatttttagagtaggggacttggattagccctttcagatcaaagatccctaatgtgagtttatgcaccctgagaggatcatgtctagaaagaagtaacagagtatcctcatccatcctgctctctgttcttttccttttcctttcagatttcaatatcaattttctcatgaggcgtattttagtcagtattttggagaaggcattctaatgactcctatgtctatttttttgaaataaaattcattttgtcattataaaggtaatatagaaaattttttaagcatagaaaatgaagaagaaagcaatcataatcatggatgtcatgctactgaaacccttgggatataactagaatggaagtcaggctggtaaagcaaatcccatgagaggagagagtgattactgggagaggggaatgtttgggggggtagaataatcttcagattcctgaaggactatagtgcagaagttggaatagaagacagaattatggttaatgagtagaagctactagagatacagattttaactcaatttgggaaaaacaaaactagcaattgcaactgtccaccagaaaattagtgaattcctctgaatgcccataggtattctagtaaattactacatgtacttcaaggttgccagtagaaggtgttcaggttcttggcatctcgaacaaagaattagacaaaatgcacacacaacgtgaggaaaccaaagcacggatttactgaaaacaaaagtacactccacagtgtgggagcgggcctgatcataagagccccgcttacagaattttctggagtttcaatactgtagaggtttcccattggttacttggcgtatattctatgtaaatgaagagaatgaagtcacagagtcatttactcagactgcgccctattttaaatggagaggatgttgcttggtgtgtgtggtctatgtaaatggagaggatgaatgtgaagttacaaagtgtaaatgttgtggagaggatgaagtggagttgcaaagccattcacattcctgtcattactgaagtgctttcacttgatataattttaggacattagtgtggatcgggcttgtgttccctgcctccaggccctattctcctgcctcagcctcctgagtagctgggattacaggtgtgagccactacacccagctaatttttctatttttagtagagacagggtttcaccatgttggccaggctagtcttgtactccttgcctcaagtgatccacctgcattggcctcccaaagtgctggggttacaggtgtgagccactgtgcccaggctgaatttgaatgttgacctgtcttgctaggttgacgaagttctcctggatgatatcctgaaggatgttttccaacctggttattttctccccatctctttcaggtaccccagtcagtcataggtttgttctctttacataatcccatatttctcggaggttttgttcattcctttttattcttttttctctattcttgtttgcctgtcttatttccgaaagatagtcttcaagctctgaaattctttcccctctttggtctattctgctatttatacttgtgattgcattgtgaagttctcatgttgtgttttacagctccattagttagttatgttcctctctaacctggctattctggctatcagctcctgtattgttttatcatgattcttagctttgttgcattgggttatgtattaattcgttctcacactgctaataaagacatactcgagactagagaattgataaaggaaagaagtttaattgactcacagttcagaatggctggggaggcctcaggaaacttacaataatggcagaaggggaagcagacacgttcttcttcacatggtggtaggagagagaatgagtgcccggtaaagggagaagccccccttataaaaccatcagatctcatgagaactgtctgtcatgagaacaggatgagggaaactacccccatgattcagttatctccacctgagccctcccatgacacctggggattatgagaactacaattcaagatgagatttgggtggggacacagccaaaccatatcaggttacaacatgctcctttagcttagtgaagttcattaccacccaccttctgaagcctacttctgtcatttcagccatctcagcctcaacctagttctgtgttcttgctggagaagtgttaacggtcatttggaagagaacagactctctggcttttttgaggttttagcatttttgcattgatcgtttctcatctttgtgggcttatctacctttgatttttgaggttgctgacctttgagtgaggtttttgtggggtcttttttgttgatattgttgtagttttctgtttgtttttctttttaacaatcaggccactctatctatcgtaggactgctgtggtttgctgggggtccaatccagaccccagttgcctcagtttttcctgtacctggaggtatcaccagtgtaggctgagaaaaagcaaaggtggcagctagctccttccactggaagctccatcctagggggatactgaccttttgccagcccacacacacctgtaggaggtggctgaagacccacattgggaattgtcacccagtcaggaggaacgggatgagggacccacccaaagaagcagtctggctgctttttggtagagcaggtatgctgtgttggaggaggtcccttccttgtttggaccacctatattctccatagctggcagactagagcagctgacttgactgaaccatagaggtggtggctgcctctcccccccaggaactcagagttgtctctgatggactctaatccactgccattggctggctgggattccacgccagtcggtcttaacttgtgaggtgctgtggaagtggggcccacagaacgtcgctgcttgactccctggattcagctcccttcctagggatatatacagatggatttcccacctttctgggaatcctggggctggtgtatttaaaactcctgggtctctgcatgtacctaagtggctactctgccgtgactccacatagctctgtgtatcagacccaaggccctgttggcatggtctcatgaggggactctcctgataggtgagttgcaaagatctgtgggagaagtgtggtttcccaggtggggttgcacaatcactgtttcccttggctgggggtggagtttcttttggctctatgccactcctgggtgggctgtcactgccctgcctgccccacactacttttctttgttctctctgggtcaggtggtttgcctagtcagtcccagtgtaaccacctggatatttcggtgctgaattcactcttcctttttcattcgtctccatgagtgtaatggaccacagctgtttctaatcggccatcttggattgatctctgaagctaatctaaaaggtgaggaaactaaggttatgggaagttaaggaaactggctaagacatcaggactcagtgacaaagctgggatttatatttcaaattcagcagctgtaattttttttccattgtgtgcatcttctaaaataaataatcctgtatattagagatatagaggcaacagaccaattcttgtttcctggagagtttgggaaacttcctagaattccaagacacacaagtaccataagtgtaaatatccttccaaagccatttgccttcacctgggtgcctaaagcttcaatgcccagatatgccatagaaatacagatcattctgtagctggagttgtcccattacaactctgggtttatgaaatgtgcatctggtgaaatacatgagcctttgtcttcagattatgagtggaatgtgataatataaagagaaacttcttttaatacagataatgcatttttctttatcacagaccttccacaaattctgctgttctatttgggtatttgacaatggactttgtaatgtatgacagtgcatatgggaaaataaaatgttcatgtggggtatggggaaagagaattctcagcaaatgaattggaattataatataaagcagtatagcattaggatttgaatataaaatcatataaagccatataacactggatataggtggttaagaagtggataaaaaaatttcatggctgagtgcggtactaacgcctgtaatcccagcactttgggaggctgaggcgggtggatcacctgaggtcgggaatttgagaccagcctgaccaacatggagaaacatcatccctactaaaaatacaaaattagctggacatggtagcgcatgcttgtaatcccagctacttgggaggctgaggcaggagaatcgcttgaagccgtgaggtggaggttttggtgagctgagatcgcgccattgcactccagcctgggcaacaagagcgaaactctgtctcaaaagaaaaaaaaaaaaaaaaaattcctagggagatttctgattttaaaatggtgacatggaagcaagctgcctccactctcccctccccccacagaaaaccaaaaacaaatatatagcgccaagatttttgctagcaacaactctgagcagtcagtaggagaactgaacttccatatccaaggttctgctctctcccccattctgcctggcaataagcttgaggaaaatctttccccaacttagagtttctacactagaaaaactgagattgaggccaggtgtggtggctcatgcctataatccctgtactttggtggctaaggtgagaggatcacttgagcctgggggttcaaggttccagtgaactatggttgtaccactgcactccagcctgggtgactgaacaagactatgtctctaaaacaaaaagagagattgagaccatcaaccatcttttcgcaccatactgggttacctggcaggagacctgttcttgccttaacccacaggaagcatcatgactgcctaaagggaggaatattcccccaaggacaggcagacaaaggggagaaatgggactatcatccctagctctgaaaactctgctttgtaactaggccaaaggagatgccacataaaagtggctgttcagtagctctattctataggaggtacatttctttctttctttttttcttttctttttttttagggaggaggggtgtcttcctctgtcacccaggctggaatgcagtggcgtgaacacagctcactgcagcctcaactccctgggttcaagcagtcctcctacctcagcctcctgagtattgggactacaggtgggtgccaccatgcccagctaatttttaaaatttgtttgtagagacgggggtctcaccatgttgccaaggctggtctcaaactcctgggcacaaggtatcctcctacctcagcctctcaacttgctgggatgacaggcatgagaagagagtggtatatttcataggttccttggacaggaacctctagccagccttctcacactgctgggataatctctttgggaactccctagtttgggacaggcagcactccaatcatgcactagcgtcaaggtgaacctgggctttaaggtgccacaagagccaaaaaggaggaagtgacctagtagtaaagatttgctaaggaactatatctaataaaaaacaaaacaagccagacagaaaatactgaaataaataactaattcttcaatgcaaatactagaataaataactaatccttcagtgcaaaaaccatgacctttccaaagagacagagcaacaattcagtcactagccttaagtgatgatttgtaagatctgtgacctagcattcaaaatggcaattttaaggaaactcagtgatcaccatcataacaaagaagagcaattcagaaatttatcagagaagtttagcaaagattgaaataacaaaaaattaaatggaaattttagaactaaagaatacctttcctgaacagaagacttcattaaaggctctcaacagtagaatggactaaacagaggaaaaaaaaaatcagtgagttcaaagactgtctgaaaatacacagagaagtctgggtgtggtggctcatgcctgtaatcccagcactttaggaggccaaggtgggtggatcacttgaggtcaggagttcgagaccagcgtggccaacgtgatgaaacctcatctctactaaaaataccaaaattagctggacatggtgccgggtgcctgaaatcccagctactcaggaggctgaggcaggagaatcacttgaccccacaaggtggaggttgtagtgagctgagatcgcgccactgtactctagcctgggtaacagagtgagactctgtctaaaaaaagaaaaagaaaaagaaaaaagaaaatacatggaggagaataaagaaaaagaatgaaaaggaataaagatagcctacaatatatagaaaattgcctcaaaagaccaaatcttagaattactggtgttcaagagggagctaagcagaacaaggaaggggaagaaagcttattcatttcctttgagacaggatctcactctatcacccaggtcggagtgcagtggccccatctccactcactgcaacctctgcctcccaggtttgagccattcttccacctcagcctcctaagtagctaggactgtaggcatgtgccaactcgcctggctaatttttttattttttggtagagacggggtttcaccatgttagccaggctggtctcgaactcctgacttcaagtgatccacccaattcaacctcccaaagggctgggaatataggtgtgtccaccatgcctagcctagaaagcttattcaaaaaataataataggctgggtgcattggctcatgcctgtaatcccagcattttgggagaccaaggcaggcggatcacatgaggtcaggagttcgagactagcctgaccaacaaggtgaaaccccatctctactaaaaatacaaaaattagcggggtgtggtggcagatgcctataatcccagctactggggagggtgaggcaggaaaattgctggaatctgggaggcagaggttgcagtgagctgagatggcgccactgcactctagcctgggtgacagaatgagattccatctcaaaaaataaaaattaatataataataatagtaatagaaaactttccaggtacaagaaagcctgagatcactaaacagattcaacccaaataagatatcccaagggatatagtaaactctcaaagatcaaagataaggagaggatttgaaaagcagcaagagaaaagaagtaaataacatatgaaagatctccagtttggctggcaatagacttctgaatggaaaaccatataggccatgaggggatgaagtgacattttcaaagtgctcaaagaaaaaaaaaaacttgcattcaagaatactgtacccagaaaaactatccttcacatatgaaggagatataaaatctttaccagacaagtaaaaactgaatcattcaccaccaccgggcttatcttacaagaaataaagggagctttcccatttgaaagaagaaagcactaatgggttaaaaaaaaaaagttttcaagatataaaacccacttgtaaaattaagtatacggataaacccaaaatactctgttactgtcatgtaacaatagctacagcagcctgttaagagatagataatgaaaaatatataaaatcagacaactgaaagtcaaaagggggaggcagagtagaattttgtcatgtttttttattttgcctgtttctgttcttttatttgtgatccaagataagttgtctttttaatttttttttaagattgggtctcatctgtcacccagactggactgcagtggcatgattatggttcactgcagccttgaccttctgggctcaggttatcctcccacctcagcctcccaagtagctgggactgcaggtgtgtgccaccacacctggctcatttttttgtattttttgtagagacatggttttgccatgttgcccaggctggtcacaaactcctggactcaaatgatccacccacctcggcctcccaaagtgctgggattacagacatgagccacaacacctggcccctatgttgtcatcttttaaaaataatttgttatatctataagatgcttttttttctcatgataagcacagtgcaaaaaacctataatagattcactaaaaataaaagcaacaaatttactacctattaggtaggaagaaagaaaggagtctcaaaacaaccacaagacaggcaacaagtggcattagtaaatccttacttatcaataataacactgagtataaatggtctcagttctccaattaaaagccatacagtggctgaatgggtaaagaaacaagacccagctatatgctgccttcaagaaacccatttcacctatcaagacacacatagacttaatgtgaaggggttgggaaaatatattctatgcaactggaaatgagcaggaatagctacaattatatcagataaaatagtacactaatcaaagaatgtaaaaagagacaaggtcactatataatgataaaagggtcaattaagcaagagaatataacaattgtatatttttgcactcagcaccagagttcccaagtatgtaaagcagatgttaaatctaaaaggagaggtaaactgcaatacagtaatagtaggggattttaagccccactctcagtaacagatgatccagacagaaaattagcaaagaaacagtagagttaaactacacactaaatctaatagacctacctgacatttatagtacatttcacccaactgctgcagaatacacattctcttcatcagcacatggaatattccccagaatagaccatatcttagaccacaaaacaaatctgaacatattttttaaaaaagaaatcatatcaagtatcttttccaaccacaatggaataaaactagaaatctgtaacatcaaaaatacacaaacacattaaataagtaagttaaacaacatattctttttttttttttttttttttttgagagggagtctcactttgttgcccaggctggagtacaatggtgcgatcttggctcactgcaacctctgcctcctgggttcaagcaattctcctgcctcagcctcctgagtggctgggattacaggtgcccaccactacacccggctaatttttgtattttttgtagagatggggtttcaccatgttggtcaggctggtctcaaactcccgaacctcaggtgatctgcccacctcggcctccccaagtgctgggattacagacgtcagccactgcgcctggccacgagatattcttgaacaaccaatgggtcaatgaaagtactaaaaaggggccgggcacagtggctcacacctgtaatcccagcactttgggaggccgaggcgggcagatcacgaggtcaggagatcgagaccatcctggctaacatggtgaaaccccatctctactaaaaatacaaaaaaaaaccattaaccaggtatggtggtatgcgcctgtagtcccagctaattgggaggctgaggcaggagaatctcttaaacccaggaagcagaggttgcagtgagccaagatcgcgccactctactccaacctgggcaacagagtgagactctatctcaaaaaaaaaaaaaaaaagtactaaaaaggaaattttttaaaaggtttttttttgtttgtttttgagagaaggtcttactctgtcacccaggcttgagtgcagtgtcatgatctcagctcactgcaagctctacctcccaggctcaagtgatcctcccacttcagcctcccaagtagctgggactataggtatgtgccaccatacacctgactgatttttttaaatatttgtggagatgaagtatcactgtgttgctcaggatggtcttgaactgctgagctcaagctatcctctcactttggcttcccaaaatgctaggattataggcatgagccactgtgcccatcctaaaaattttttgaaacaaatggaaatggaataaaataaattaaaactatgagaacaatagaaaagatcaacaaagtgaaagtggtttttatggaaagttaaaatcgaaactttagctagactgagaaaaaaatagagaagacccaataaaatcagaaacaaaaaaggaaatataacaattgaaacctcagaaatacaaagcatcgttagagactgttatgaacaacctggaaaacctagaagtggaggaattcctgaacacatacaacctaccaagactgaaccataagaaatagaaaacttcaacaaaccaataacaagtagtgagatcagccgggtgtggtggctcatgcctgtaatcccagcactttgggaggctgaggtgggcagatcacgaggtcaggagatcgaaaccatcctagctaacacggtgaaaccccgtctgtactaaaaatacaaaatattagctgggcatggtggcgggtgtctgtagtcccagctacttgggaggctgaggcaggagaatggcgtaaacctgggatgcggagcttgcagtgagctgagatttcgcgactgcactccaacctgggtgacagagtgagagtctgtctcaaaaaaaaacacaaacaaacaagtaatgagatcaaagctgtagtttaaagtctcccatcaaagagatggagatgcaaggagggctcagtatatgcaaataaataagtgtggtacatcacatggacagaaccaataacaagaaccatttgattatttcaatagatgccaaaaaagcatttggtaaaattcagcatccctttatgataaagcccctcatcaaaatggaagtagaagaaatgattatgtaccttaataataatggaattattatacctcaataataaagaccataaatgacaaacccacaggtaacattgtactgactgggaaaagttgaagcctttcctcctaggaccagaacaagacaaggatgcccacttataccactttttttcaacgtaacagtggaagtcctggccacagcaattaggcaaaggaaagaaataaaggacatccaaattggaaaggaagaagtcaaattagccttgtttgtagatgacatgatcttactcatagaaaaacctaaagacaccaccacaaaactgatagaactgataaacaaattcagtaaacttgcagcatacaaaatcaacatacaaaaatcataattgtaagtcagagacgatctgtgcaagtatctgtttgagtccctgttttcagttattttgggtatatacctaggagtggaattgcttgcttaaatcataattctatatttaactattaaggaaccaccatactgttttcacagcagctcaaccattttacattatcaccagcaatgcagaaggttctaatttctccactcttcactaacatatgttattttccattttttgattctagccatcctagtttgtgtaaagtggcatctcattgtgattctgattgcatttccttaatgactaattatgttgagtatcttttctcgtgcttattagccatttgtatatcttctttggagaaatatctattcagattttttacctatttttaaatttttttatttttattgtcaagtaaacttttttatatattatggacagcaaatccttatcagctatatgacacagatattttcttccgttttgcaggttgtcttttcactttcaagaaagtgtttttgttaaaaaagttttaaacttgcttgaagtctcactatttttgctttttttaaagaaagcaaacctttatgtaataatgagtgcaaacggctttgttgacacttacagaaataatagctaaatttaatgcaaatttgtgtgaattgaataactttgttacattttctaagctttatctttctatgaaatagggtcccattcacctataaaggatattttgggatttttcactaaaacttataaaatctgagaatgtgcttaggagactggagataaattttgtgagcctattatctagttagtaatgacaccatcttattaaatttcaaggtgttaaatatagcccattcaaatactcgtatatgtaatctaattattattgttatagaagttaaagctcccttgctgaacctatgattcttctaagctgctgaacatagagacacatgactgagcagtaggaggtgcttattgcttccagagttgcactatgcttgccttgatggcgtagaatggccataaagatgactgtggaaacagtgatttctaaactcttctcagagttttggatatgctccatatccaaatgaaacagatgactgtgttctgttctgtagattttactacttttctctgccagtagcctctcacatttgtcacgcaataggaaccaagcaagagaatctggacagatcagctcacatctattgccctgttaaagtaactcaaagatatgcccaaagaattggatacttgtttcatcattggataagctggaactgtctataagtggctaggatgtatcatgccttatcacaagaaatagcagaaaaaaaatatatagtctttgatttcattaaattcctttgtttgtttgtttgtttgtttatttttggacacagggtctctctctgtcacccaggctggagtgcagtggtggtgctaacatatctcactgcagccttgaactcttggctgaagcaatcctcctgcctcagccttctgagtagctgggactaccagtgcatgccaccatgcccagctaactttttcatttttttgtagaaatggggcctcactttgttgctcaggctgttcttgaactcctggcctcatgtgatcctctcaccttggcctcctaaagtgctgggattgcaggccagatgagccactgcacccagccaatttcacaaagtttcagtattctcagaaaagaacatactcatatctagaaatgtcttatgacttaaaaagcaaagtataaccatgtgcatattaatagggcacaaagtgaatctggtagagtgccagctgtgtctaatctgataagtttatttcatatggaaaatgtgtgtcaatcttagatgaggctaatttgttgaaaataactgaattctggtctcttttagattgtcagaaagggattcatttaacagtaaaatttaatccagatatatgtagtcatatgtttttaaactttttaaaccctgaaaattattgaaatatgtgccattttaatagtatcagcttctgattgcttttattccatcatcatgtgatatactcctcattaagcagcaccagtaaccagagtttaattattgtgtagcactgtgtgaaagcttttgtctctttatcatatatggcacagacagtactcttggttgtaagtagggatatccagcatagtttactgtctacatgcttatttctttagctttttttttttttgagatgaagtctcactctgtcgcccaggttagagtgcaatggcacaatctcagctcactgcagcctccgcctccaaggttcaagcaattcttccacctctgcctcccgagtagctgggattacaagtgtatgccaccacgcctggctaatttttgtatttttagtagagacagggtttcaccacattggccagactggtctcgaactcctgacctcaagtgatctgcccaccttggcctcccaaagtgctaggattacaggtgtgagccactgcgcccgacctctacatgcttatttctaagagctatataataaaacaatataactatacagattttgatggtttcctccagagcctttgccttgcttatcattgctgtgtgagaagggtagcagcactaaaccttgtgtttctagagatagaagtttgtccctgtgtactgtcgattaggacaggcagtttttcttgtcttgcctgaagaaaaacgtaacttttttgagatacaatctttctgataaggtaaatatgtttagcaaagccttattttgtggaaattttccaaggcttgaccctgtaacttctatagtagagaaaagggcagtgctttcaaacttttagctcttctcctggttggttgcctgccatggtcgtattttaaattgagtagcaagtaaataaatacttagcttctctctataaatgagctgtctgcaaagggtttctttgtactatatgactgttgtaaagtttcaatggagtaattataggaaaagaaaaagaacagatttttacttagtgctgtgttaatgccagtgtttgtatgcaataaaaatgactggccactcattgtttcagaaaatagatcttaacactcaaaagaaacaaattctaaaactttaataactttgaggaacactctttaaatacctagactttagatacatactattgtccaggatagatttcccagcatatttatctacaacagatcttaaatattgaaaactaacagaagttgttgcataaatttttctgcaattagataagaacatttttatggctggtctgcaaacagtccgtaaagatagttgctgcctatcatacttagagttaagggatgaactccattctttattttctaaactgtgattgcattatcctaaaatccagtggtttttctcacatacagtctaggattgagaggtccaaggccagtagggtgcctctgcctcctctcaagctgcttccattgatgggttcagggatttgttagagcttttaccatctccctgccaacaggggaaaggaagagagaatacatcccttccgttttaggggcacaagtatcaaatgacatatatcacttttatttaccaaccagacctaatcatatggccataccaagctgcagggatggctgggaatgatcatctttagatagataaccacaagcccaattgacaggaaggattattactaaaggaagaagcagagtggatactgaagtacaactttagtagtctctgccacagtaatacctctaaatgcatacatatgagtctgtaggaacagtcctacaaaggactggtgaagctttatattaatatatagtggtttccctttctttactgtctgcagaaagattctggctagattttttttttaaactttttcaacagccttataaaggtataagttatatagtataaaattcacctgtttgtgcaatttagcagagagttcacagagttatgcatccatcatcacatccagtttcagagtattttgaacacctccctaaaattccttcatgctcatttgcagtcagccctcatcctaccccccagatccattcacccctaatctgcttttatataaatggaatgtatgtataaatggaaccatacagtatttagtcttttgtacttggcttcttttacttggcataatgattttgaggttaatctctgctatagtaaataacagttatttcttcttttttgttgcataatagtagcttgttccttttcgttgcatagtgcattgtatggatagcccacattttgtttatccatttaccagttgatggactttttgcttgtttctagtttttggctactatgaataatgctcctatgaatgttccccacaagtttttctgtgaacatgtgttttcatttctcttgggttgatgcctaggagtgaaattgctgagtatagtaagtttatgtttaacttttaagaaattgccatactattttccaaagtggctataacattttatattcccaccagttatgtataaggattccagtttctccatatcctcaacaacacttgatgtcaatcatttttgtagtagtatctcatttgaggtttttatttatattttctaatggtgttgagccccttttcatgccctttatatattttctttggtaaaatgtctgttcagagtttttgcccttttttcttttgttttttagacagtcttgctctgtcaccaggctggaatgcagtggcgtgatctcagctcactgcaacctctgcctcgcaggttcaagcgattctcctgcctcagcctcccgagtagctaggactgcaggcacacgccaccacgtccagctaatttttgtatttttagtagagatggggtttcaccatgttggccaggatcatctcaatctctcgacctcatgatccgcccacctcggcctcccaaagtgctgggattataggcgtgagccaccactcccagcctttgcccatttttaaattgggttatttgtcttcctattgagtcatgagagttctttatatattatagaaataagtcctttatgacatatatgatttataaatattttttcccaatctgtggctttttaaaaattaatggtgtgttttgaaaagcaaaggttttaataacttagccatttttttcttttatggattatgcttttggtgtcatctaataaatcttggcctaatccaagactgcaaagactttctcttatgttttcttctaaatgttttatagttttcactgttatatttaagtctataataaatttttctttagttttttttttttttttggtatggtatgaggtaagggtctatgtacattttttttttgtatagggctatccaattatcccagcactatttgttgaaaagattattctttcccctattgaatttccctggcaactttgttgaaagtcagatgaccataagggtttatgtctgaactctcaattctgttctgttaatctatatgtctctctttacctggctagatttttaagactttcacagtaatgtttctgaattcaccttcttgcttttacatgcaatcttgtcaatgatgggacctgaaatgacctcacaacacttaaatatcgctgaaaagagtgatccagaagctgaacaaagttttatattcataagccagataaataaatacaagataagaagcatgtcaacccagaggggaaaagggccaaaagggaaaatatgatagtcacaaatatgaagtttttttgtattaaaatacaggttaacgaagagatctaaccagatagttgcttaaacaagaaagatcttcatttttgtcttttagtgtcagtttcagtatacacaatccaaatttgatgtggtggctgcgttgaagtcaggaaatcagactcgctctactatctcaaaggagagcatatctcgtcctttgaaggaagtttcacacattaattttattcattccattggtgaaaacttgtcactggccatacctagatgcaaacagcacttggaagcataatctttagctgaaggccgtgtgcccaactaagacttacattactaaataacaagcaggtgtcttagtcaactcggactgccataaccaaacaccgtatacaatatcacttaaacaatgaatatttatgtctgcagttttggaggctgggaaatacaagatcagtgttccagtagatttggttcctggtgagaactcttttcctggcttgcagatagccacctttttgttgtattctcacatggcagagagggagagttttggtttctcttcctcttcttgtaaggacactaataatcatgggggctccaccctcatgactttatcaaaacctagttacctctcaaaggctgcacctccaaatgccatcacattggctgttagggcttcagtatctcagtgtgggagtgggttggggaggacataaacattcggttcatatcagggaaaatgcacacttagaggaaattggcaggttatgcttccaattacatcagtattacagatttataaatatgtgttgatattatgtatacatcagaatatataatgtatgtatgtgttgatattatgtatacatcagaagacaaacattgaggacttacattggagacactgttatggcgattgcaaagactgcctttagtgagatttccagaatttaacagctggtggaaggggaggcagttatagtgttataactttataaatgttatttctaaactgaaaatgccattttaattttccaaacacaatcactgcagatctaagctgcactatttacagtttttgtagctaccttgatatagtaattcttcacttcaaaaaatatgtattgaggctgggcgtggtggctcacgcctgtaaccccagcactttgggaggctgaggtgggttgatcacctgaggtcaggagttcaagaccagcctggccaacatgacaaaaccccatctctactaaaaatacaaaaagtagccaggcatgctggcgattacccgtgatcccagctatgcaggaggctgaggcaggagaattgctggaacctgggaggcagagttgcagtgtgctgagatcgtgccactagcactccagcctgggtgacagagtgagactctgtcttaaaaaaaaaaaaaaaaaagcccaaaaaacatgtatacgtgtattgagtgcctgtcatgtgtcagggatacaggggtaagttgtctgtaaccagaaatacaattatgtttggcctcaaacagaaagcagagtcttctcatcctgaaatattgcagttttaataataatataagaggcctttataatttagaactattatgaagtaattatgttttggaaaaatcccaggactggatgcaaagagacttaagtgtatgtcccagttctgtcactcatcgggcaactgtgggctgacctgtttcctcaggtttaaattgaaggagtttattatatattttagtttctacagtctcctttgtttctatgattctgtagctctaattatctataatgtatatatttatgtgaaatatactttattatctataatctgtacatttctatgattccatagctccagttatctttaatctgtagtcctagagtatttattgcaaaccacctcaaaacagtgtcataaaacaatggcagttatgctcacagaatctgcggagcaagaattcacacagggccaggcatggtggctcacgcctgcaatcccagcattttgggtggccaaagtaggagaattgcttgagctcaggagttagagatcagcctgggcaacatagtgaaacctcgtctctagaaaaaaagtttaaaaattagccaggcatactgctgtgcacctgtagtcccagctacctgggaggctgaggttgcttgagcccaggaggtcatggctatagtgagccaaaattgtgccactgcgcttcatcctgggagacagagcaagatcttttttcaaaaaagaagaaaagaattcagagcctgggcaacaaagtgagacccacccccccgatctctacacaaaattcaaaattaaaatttaaaaatttgtctcgtacagtggcatgtgcttgtagtctcggctattcaggaggcttgaggtgggagaattgcttaagcctaggagttagaggctgcagtgagctctgatcgtgccactgcatctgcctaagcgacagagcaagaccttgtcttttttctttttttttttttttttgagacagagtcttgctctttcacccaggctggggtgcaatggcacgatctcggctcactgcaacctccgcctcccaggttcaagtgattctcccgcctcagccttccgagtagctgggattacagacatgcgccgccatgtccagctaattttgtatttttagtagagacggggtttctccatgttggtcaggctggtctcgaactcccgacctcaggcgatccgcccgccttgacctcccaaagtgctgggattacaggcgtgagccactgcgcctggccaatccgtggttctttactcttgtgtcagccacctgaagtgggatgtttcaaagacagggctcagctgggaccattaactgaaacacctacttcggcttctccgtatgtcttgagcttcttcacagcatagtgccctgaatgtcttacatggcagctcagggttctcagaactggtgttctccaagggaaagtttttgtcttataaaataattaaaaatattttagtgtaataaaaaaattaagaattatttttaagccaggcatggtggctcactcctgtaatctcagtactttgggaggccaaggtgggaggattgcttgaatccaggaattcaagaccagcctgagaaacaaagcaacacagtgtttctacaaaaaaaaattaaaaaattatctgggcacagtggttatgcctgtagtcccagctacttgggaggttgaggcaggaggatcacttgagcccaggagtttcaggctgcagtgagctatgatcatgccactgcactccagcctggacaacatagaccttgtctcaaaacaaaacaaaaaaagaattattcaaaccaaattgatgaaaagtgttaagtattaggtaagtagagttataaaagtttatttggggtcaccaggaacttaaaactggcatttattgggtgtatactatatgcttggcattggaccataagcacttttgtggattataatgtgatttattcttcacaacagccttatgcagaaaccaaggcttagagaagttaagcatcttgtccaggtcataatgctaagtggctgaactgtgactcaaaacagatctaactccaatgttagtggcctaactactgtattagtccattttcacatgctaataaagacatacctgagactgggcagtttgcaaaggcaagaggtttaatggagaagtcacagttctacctggctggggaagcctcacaatcgtggcagaaggcaaggaggagcaagtcatgtcttacatggatggcagcaggcaaagagagagctggtgcagggaaactcccatttttaaaaccattagaacttgtaagactcattcactatcaggagaacagtgcaggaaagattcacctccataattcagtcacctctgaccaggttcctctcacaacacatgggaattacaattcaagtgggagttacaactgaagatgagacttggatggggatgcagccaaaccatatcaactactgttacgagttgaattgtctttaccgcatccctaattcatatgttgaatatgactatatttggagtatagtcagcatctcagaatatgactatatttagaggtagggtctttaaagtggtaattaaggtaaaaggaggtcattggggaaggttctaatccaatatgattagtgtccttgtaagaagaggaaatttggacacagacacacacaaaggaaagatcatgtgaggatacagggagaagatggccatctacaagccacgaattgagccctcagaagatacaaccattgccaacaacctttatcttggatttctagcctccaaaactgttaggaaagaaatttctattggttaagcccttcagtctgtggtactttgtttttttgttgttgtttgagacggagtcttgctctgtcgcccaggctggagtacagtggagcgatcttggctcactgcagcctccgcctcccgggttcaagcaattctcctgcctcagcttcctaagtggctgggattacaggcacatgccaccatgcccagctaatttttgtatttttttagtagaaacggggttttaccatgttggccaggctggtctcaaactcctgaccttgtgatccacctgccgcggcctcccagtgtgctgggattacaggcatgagccactgcgcccggcccagtctgtggtactttgttatggcagccctagcgaactaataacgtcactaatagcacattactaatgtgcatacctgggttttgttttgtttttttaaacctgttttaatcagcctactttagtgctgtccttcccattgccctctctcttacaaagatattgtggacagatacatttgttttttatagacctacaaactttcttaccattatcacatgctgagacatataataaaggtgtacaattcttcaaggtaaaaatacctccacatgggcatactctttcctataggataaaattagagttcttccctcttttgagatgtgagcatcaattaatagcccctaaggagtttattttctgcaaagatcaagattaattacaattgtttcaaagtaatccggaaatcaatgtggaaatctctggttttataaagctagttatcagctgctaacgaactgtctaaatatgccaaaaattgaactttatcatgtagcatttaccttctgaaccatgtatttatttattatggtctgtcatgtttgaattttttgtcttgtgttatatatataaatcttgcctccctaataatgagcttcctaaagatgcacatttttgaatcctctttagttagtaaaatgtaatgaatgcatttgtaggtgagcactaaatgctattaaactgaattgtaattttcagatttaggtattttgtgtacagtttccctctaaactccacttttgaaacactattgaaatcaatatgggggatgctgttttgatacattcactctgcccttcaatttttttaagtataatttccattttatttttctccagaagatagcttttcttcagtccttaaaaactcagcttcttacacaggcttggtagtggttgtagggcagcacccggaggcctaaaaatgggtgtttagtcattcccagcttcataagaacaattcctgtctaccttgctatgggtggcaccactcacacagtaacgcagttttacatacatcttgggaagcgcatagacatcaaagacactccagaaataatccctgacagctgtagcctctactatgtttcaaatgatgaacttcttaaaatggccttgtccttgggcacgcatcaggcgcagtttatgcagcaaatagacagcatgtggctgcagctctttttggcatgaccattgttccttctttatttgtcatcttggaagcaaggactgaagagctgcctttcaatttttaaaaccacagtcttctttcctgacatgttccttagacagtggctctctctcgcagcactgttttctcaccctggggcttaagaacataacctatcaatgtattggaagagaaatgtttctgaataaggaccaggcctttgatcattttgtgagatattcatggtctcctctatctgaaagagcaatgataacattatttccaaaactggaactcatgcatattcacatctcaagtatactaaaacttttcattttctggtgaagaaattcaatgtagtggttaaaagtgtgggctctgtcttagttcaaatcccttctgtgccaactaccagctgtgtgattttaggcaaatcaacttaatcttgttgaaccttgatttcctgttctataaaatgtagccaattatagaggataggccaggcacagtggctcatgcctagaatcccagcactttgggaggcccaggtagaaggatcacttgagcccaggaatttgagaccagcccgggcaacagagggagaccttgtctctacagaaatatcaaacagccaagtatggtggcacatgcctgtggtcccagctacttggggggtcaaggagattgaggctgcagaactacggacacatcactgtactccagattgtgtgacagaacaagaccctatctcagaaaaaaaaaaaaaagtagagcatatctatagagttgtagaaataaataaggtaaggtgtgttatatgcttataatagcacatgggacataggaaatcttcagtaaatgttagtcattattatcattaccattatttattggctatccagatattggagaaaactgaaatcgaccttaagactgatttgtgtaaagcacagtaagtattcagtgaatgtttattgggtaataaagacatgtcaagtgtatatggaggctttattgaatagattaccatttttcaaaaacaatgaaaggttttaaacagtttatttcagcacctcctcaatgaactggagctcaaagccttaccctagtgccctgtctggatgagtgacacatagccaaattatataataatgttaattatttgaggatattgtatataaacaaacatttagaagtcagtttgctgaccaagtacggaggcttatgcctgtaatcccagcactttgggagcccaggcgggtggatcacttgaggtcaggagtttgagacagcctggccaacatgttgaaaccccatctctactaaaaatacaaaaattagctgagtgtggtggcacgtgcctgtaatcccagctacttgggaggctgaggcaggagaatcgcgtcaacctgggaggtggaggttgcagtgagctgagattgtgccactgcattccagcctgggcgactgagcgagactgtctcaaaaaaaaaaaaaaaaagaaaaaagaaaaagtcggtttgtttaattgtagcttttgtcacctctaagatttaatcaggaaagtatttagtcaaaacttacactgctgagtagtttcattaggagatgcaaatatgactaagctattacacctggttcagggcttgtaagcattcactttcaaactactggacagtctagaaagcttcataagaaagatacaaagtactgactgggcacagtggctcacacctgtaatcccagcactttgggagggcaaggtgtgtggatcacgaggtcgagagattgagactatcctggccaacatggtgaaaccacatctttactaaaaatacaaaaatcagccgggcatgatagtgtatgcctgtagtcccagctacttgggaggctgaggcaggagaatctcttgaacccgggaggcagaggttgaagtgagccgagattgcgccactgcactccaatgtggtgacagagcaagactctgtctcaaaaaaaaaaaaaaaaaaaaagagagagatacaaagtactactgaaatctagaaaaggggaaagagcatctcttactgcagaatcagaagggaggacttcatgaaataaatggcatttatggagaactctaaaggatgactttgcttcctacttcgcagagcatttagggtaattggattctgctcagatgtattacttttccccaggcccagaaaagattttgtccccctgctattcaacattaatctattcaaccttgctttagatctggtccttcccatcttcctcagagccttgcatggaaggataatctcaacgggcacgatggtggcaacttatgatgaccttccttaagcctggaacatgttaactctcgaattaagaaaaatcagtcactattacagaccccgagaattccctacttagtagagcttaagtttaagtagagacaggcaataaacacaatacctaagtaaaaatccatagtactgtatattagaagataactaatgtggaaaaaataggacaaggtcaggaagatcagtagtgctggaagagtgcagtgttaaatagggtagtaagggtagatttcactgaaaaggtacatttgcgcaaggacttgactgaagcaagggagtgatccatccacatggctagatagagggaagaattttcaaaagagaaaagacagcgggtgggccgggcctggtggctcatgcctgtaatcccagcactttgggaggctgaggcgggcgtatcacaaggtcagtagattgagaccatcctggctaacacggtgaaaccccgtctctactaaaaatacaaaaaattagccgggcgtggtggcgggcgcctggaggttgaggcaggagaatggcgtgaacccaggaggcggagcttgcagtgagccgagatcacgccactgcactccagcctgggagacagagcgagactcgagactccgtctcaaaaaaaaaaaaaaaaaaaaaaaaacagcaaaaaacaacaacaaaaaaaacagctggtgaaaaaaccttggcaggagcatgtctggtgtaccggaggaaccacaaggaggctagagcatgatgagataagaggagagtggaggagaccagacgtagaatagccggggagaaagcgagccaggtaggggagggctttgtaggccatggcaaggcatttggtctgtaattcttttatgatttgtgcttttggtcttgatttcttccttatgaatcatagatgatgaggacttagaggaggaaaagaagaattgttaattatcctctttttaaaaacggaatttatagattttcataaagatgaaaatgttctatatgtaaatttttttgaatatttgtttttcttttttcagtttttagttttttgtgcaattaaaaaaatataatgtgagatagagaacctgatttttctcattttgttattttggttttttgggtttgttgttggttttttttttgtttttgttttttttttgtgtttttttttttttttttgataccaggctgcagtggtgtgatcttggctgactgcaacctctcctcccaggttcaagtgattctcatgcctcagcctcccaagtagctgggtctacaggtgtgcgccaccataccctgcctatttttctcattttgatcgccagttgtctgaccaacatttattaaataacttatcttttccccacctatttgtaataatactgccttaattttgtgtctgggctctttaatactgatttgttgatctgttcctgagctagtatgtcacagtttcaattagtaaaacttattataaatctttgatgtctagtagagcaaatgccttttcctttattattgtttcactattcttggtccttttctcttcagtaagaattttttgatcactttgtcaaggctcatattttaaaaatcctttgagatattgaatagaagtgtgttacatttatgaattgattatggaagaattgatatcttcatatagttcagtctccccatccgttttatttaaaccctcttttatgttaacaaaagtttttagaaaattctgcatagaggttttatcattagatttatttccaaagaccttaagtttttgtagtaagaatgaatgggctctgtttttattacattttaaattggttgttgctagtgtatagacatactattaactttgtaaattaatctcgtatgtaacaaacttgttaatgtctttctaagtggttttattgttttatcaatatgttgttttagatttttctaattaaatgactacaatcgtctgtaaaaaatgaagatttttgccttttctaatttttaactttatatttattacatcatcttacggcatcaacagtaacttctctgttaaaagggccatgacagctggacatggtggctcacacctgtaatcccagcactttgggaggcctaggcaggtggatcacaaggtcaggagtttgagaccagcctggccaatatggtgaaaccctgtctctactaaaaatacaaaaattagccaggcgtggtggcacacacctgtaattccagttactccagaggctgaggcagaagaattgcttgaacccaggaggcagaggttgcagtgagctgagattgcaccactgcactccagcctgggtgacagaataagactccgtctcaaaaaaaaaaaaaagtgggggggccatgacaataagcatccttatgttgttcctgattttaaagggaacatttttaagatttcactgttaaagattttgtgtgctttaggttcagattgatcatttatgttgggttaatagttaatagtctattctattctgttcaaattctaatttgccaagatttttaattattaaaactgcaattacttttgcaccaacctagtattaataggtatttaattttattaagtgttgtttgtatatctgttgatgaatttgtgatttttatcctgtaatatgtgaattatagtaatatttcttcttctttttttaaattagagatagggtctcgctgcattgcccaggctggtctcgaactcctgagctcatgcagtcctcctgccttggtctcccaaagtgctgtgattacaggaatgagacaacacaccaagccatatttcctctctttttaaagacgttttagagacatggttttgctatgttgatcagactggagtgcaatggctagtcacaggtgtgatcatagtgcactatagcactgaaatcctaggttcaagcgattttcctgccttggcatcccgagtagctaggactataggtgcacaccaccacagctggatgatgtttcttcttttaaaataatattttaaatagtaaaaatgaagctgttaaaaaatctgaaatgtaaatttgaacccctctaaagctactctttcatttcacttccctgtttcaaagaacagtaccattcagcctaaaatcttaggagctaatctaggcattgctcacagctgcttggtgaccagatcctgtcattttcaatattgtcgttgcctctctattctttctttgttgcctaattattctccatgtacctgcaagagcagaaaattcctttgattaaaatctttcagtgattccctaatctgtagccttcacaaatttgaactccttactgtgccctataaggcccttcaagatctggcccttccttctccagccttgcaggcccttcttgttgcactctacttcccactgattcgccagcaaatcagtcattccttggggcctttatttagcattcctctctttgtctagctgtctagcagttactcatttttccaggcccagccaagccttatctacctccataatatatgtcctaacttccagatagagtagaccgttgaatctttgtacatcctcctatgccatacaaaccttaatcttttgaaattgtgtatggtctttattcatttatgtatttatttcatctactagacttgtatctagtatcttgaagtttgtgactattttattcaccattgtattcctaacacagtgaaggtattcagttcacgtataatgatgaataaacaaaagaacaagcagacaggcaatgattgagataaaagagaaagggattattccaaaaggaaaataatgaaagcaaaagccttgttaactgttaatttcattatctacattgagtcctgggtggagccttagggaactcgggaaatgattctaatgattgtctactgattgagggaaaagattccctgacctgcaatcttttgcaaatttgttgcctttttttctctctttatgaagaagctttttctattttcctctctttggggattttctttcttttgaattcatttagtcagttaatatttattgattacttgctatataccaggctcagtgctagtgctgggaactagttagatagagcctgtctctaccctggagtatctctctggctggctggggtacaaacatgtaaacaaacaaatatagcagtgattttcaaatatctttcctaattgtcttgtcatgtttttccaccatgaaacccaccttgtaaagaagattggctgttatgttctcactcataggtgggaattgaacaatgataacacttggacacaggaaggggaacatcacacactggggcctgtcgtggggtggggctggggggagggatagcattaggagatatacctaatgtaaatgacgagttaatgggtgcagcacaccaacatggcaaatgtatacatatgtaacaaacctgaacactgtgcacatgtaccctagaacttaaaatacaataataataaaaaagaagattggctgtttattggggttttaacagttgtatttggcaaacaaaagaataactggaagtaactgagaataggatgctggaaggaaattgtctgagatgccactctcctggtttatttactactgtcttcctcactttcaactgtcagcattgaaggattgtattcctcagttaggtaaaaaatatgaccaatttatctgctttaattagttagaaattagaaatttaggggccagacacagtggctcatgcctgtaatcccagcactttgggaggccaagctgggaggatcacttgaggccagagtttgagaccagcctgggcaacataacgagatcctatctccagaagcaaattttaaaaatcagccaggtgtagtggcatgcgcctgtagtcccaactacgaggcagctgaggcaggattatggcttgagcccaagaggtcgaggctacagtgagctatgatcatatcactgcgctatattccagcctgggtgacagagggagacactgtctctacaaaaaataaataaataaataaataaataaataaataaataaataaataagaaatttaggaagtatattcatctctactgattttaaagcaaaatttaattttttttttttttttttttgagatagggtcttgctctgtctcccaggctggagtgcagtgatgcaatctcagctcactgcagcctcagcctcctgggctcaagtgatcctcccacctcagcctcctgagtacctgggactacagacaagtgccaccatgccagattttttttttttttttgtaaagacagagttttgccatgttgctctggctggtctcaaactcctgggctcatgcaatccactcaccttgtgctcccaaagtgttgggattacaggtgtgaactaccatggctggctgctaaaagtaatttctttaactcctttaaaaatttttattttatgtatttacttatgagatggggactcagtttgttgaccagactggccttgaactcctggcctctagcaatcctcctgcctcagcctctcaagtagctgggattacaagtgtatataccaccacacctagatcaaacttcttttttttttttttgagacaggatcttgctgtgttacccaggctggagtacagtgtcagatggcaggatcttggcttcctgggctcaagcagtcctcctacctcagtctctctggtagctgtgcctgcagtcacatgccaccatgcctggctaattttttattttttgtagagatagggtttcactgtgttctccaggctggtattaaactcctggactccagcaatcctcccaccttggccttccaaagtgctgggattataggcatgagccactgcgcccagcatacgaacccatttttaagttgtcaaacatacacaaaagtagagagaagagcaccgtgaacatccacgtagtcatcacccagcttcagtaaccttcagcctcatgcttttcttgttttatatctcccccatctttttttgcaagagtattaggtaaaaatttcagacatatcattttactcataaatatttaagtatatatcttaacacataaggactttaaaatcataaccataatattgatatcagacccactgaaattaatattctaatagtgggtgcatttttaaaattcaaatgaatatgaaacaaccagagtccaagtaaaggaacttataccatgttctaatttaccaagtaggggatagtttggcttttaaccccaaatgtagtgggatttttttttgttattttagccagaaacatttaaaaatcatcccatcattgtcccctcttttaaaacagagtaacaaagtaagcagagtgaatgctcttaatttataattttattttcagggtattttacaatatactgtgggtgatgggaatgaatatgtgtccagcaaaacttgatattttcttatatgatgaatatttcccattttatttaaaaggcaaagctgatgggatattctttgcattatattctgaaaataaaaatcagaatccctgctgctaatggtgagactgatattctaataccctagttctaagcctagctttgaatgctttgaataagggaagtcattccttatgacttccaatagataatgctttgtttcactgatcctctttcagggattttctttgtgaggcttttcaagctaaatagaagccagtacttctgagccaaattaaaccttgcttcagccctggaaagacttgcatgtttttttaaaaagagactagggaagaaacagttattgtcatatgttttactaggctatattagtcatctcagccacgtagttctattttgctctttgcctaaaggtattaaaaattttaattaatttgtaagctgtagccatctcaagttcagttataaaataaactgatggtactttagatgtgcatttaccacttgccatcggtcttctgtgcactaaagaaagcaaaagatgacttatattttataccagaggtctttgttaatatttcacctaaaaaaattaaatatattgccttttattacttcctgtttgaacctacaatcaagtggagaaataccatgtgaaagattgtacatgttggcttctctggtagaagacattgtttgccttccattttgtacctaggggtagatttttgaggcttgcctgcttaccattaaaataagatttaaattataaaatttctttagactgcttttttggttttttttttttttttttttttttgcctgtccagtgaagttttgagctatacttgctcaaaacactgactataccttgagctctgaatgatagataagcagttagatagtaaacagagtagaattggtaaattagaaaggacccagaggaatcatctggtacttttccttcatataggatgaaggaaaccgctccaggaagtgatccttttctctaaggttttcaaagagggatgtttattcatttatttaatacttctttgtttttttttttttaaaagaagaatgctgagcctgatgctgtgtttaactctctccttagtcaccctcagcctggaatagtttctcagtctttgacttttataatgttgatacttttgaagatgacaagctagttatttagtagaatgtttctccatttgagtttgtctggtggttccttaagattagatttaggatatgtatcatgagcaagaatattatagaagtgatgctgtttttctcatcccattcattctatcagatggagtatgattttaatttgtctcattggctggtgatgcttactctgatcatttgaccaaggtgatttctgcaaggttctttatgtaaagttgctctattccccttcctgacaaataagaattttgtggcgaagtactttgaaattatataaatatccaattcctaataaaactttcaatttatttcatttatatatagaatcatgatttcctgtttattcagtattatatcttattctaccattatttattttaatgctgaaattatcccctacttggccactgggagctccttcaggatggcttttgtgtccttttgacatgtttccattattcttcaagcgtaacttgcttttggaaaagcaagatattccaggctctttttgtactttgctggcactagccctagaatcaggtatttctccaagtagccctggttctttttggtagacactgatatatagcaaccaagatctgtgcagtagatttgctcattgtttctggatatgtattgttgcttctatatcttctcagcagacagaactagggactaaacacacacacacttacatacatacatgcatacatacatacatacatacatttatacatacatacatacatacatacaaacatacatacatttatatgcatttgcacctgtatttcttcaaccccacagagctcattctagtttttcatctttctggatcctgaacttcctgataaatcccccagtatttgccaagtagccacctctttaattgtgtggttaccctcttcaccctgttaaaatgctgcatgccagattgcacccttccatggatgcctttctgacattctgcttgggctccaacacatctgtgtcaggctgccactcttcataaatgcccttattacgatgcttgggccaggtctccccaagcacatgaaaaactgcactgttttcgtgggtttggataccaaagaaaattgaatgactgaaaagtactgaagagtttaccttaaagggaggaaactagagcagaagttctccaaatgtgatctctagactcagaacatcagcaccccctgggaacttcttggaaatgcagattcttaggctccatctcagatctgaatcagaaactctggttatggggcccagcaatttgtgctttaacaagctttctagggaattctggcacatactagtgtttgagaccctctatccaaaggagagatagagtctcaacttagtattctatcctgcatctaggttatctctggcataatgaagactccctggttgtcaaggtcttggtacaattttttagggctttggagccatcctagaaatgaagtcctcccatatggatcaagactggaataattatccagttcaacccaccatccgtggaaaacccaatcctctagggaaaatcaaggaattatactcgaattaaactgtgctttgtctttttggtatagaaacattttaattaaagccttacagttaataaatatttaaaggaaggaccagaaattagtatcaaagaaataaaagttttgcagttttcatttttgtttttttgttgttgttgttgttattttgagatggagtctcactctgttgcccaggctggagtacaatggcacaatctcagctcactgcaacctccacctcctgggttcaagcaattctcctgcctcagcctcccaagtagctggggttacaggcatgcaccaccacacccagctaattttgtatttttagtagagacggggtttcaccatgtaggtcaggctggtctcgaactcctgacctcaggtgatccacctgcctcggcctcccaggtgctgggattacaggcatgagccaccacgcccggccgaaagttgtacagtttttacttattttaagctcacatctgatgtaagaatgtacagttaatgaactgttactctcccgtactggctgtgttttctacagtatcaaaaatatacttcaaggccaggcatggtggctcgcgtgtgtaatcccagcactttgggaggctgaggcaggtggatcagttgcttgagcccaggagtttgagaccagttgggcagcacagcaaaacctcatctccccaaaaaaatacaaaaaatagctgctagtggtggcatgcacctgtggtcccagctactcaggagggtaagatggtagaatggcttgagcccaggaggtcatgccttcagtaaactgagataataccactgcacgccagcctaggcaccagagtgataccctatctcattcatatatgtgtgtgtgtatgtgtgtgtatacacatatatatgcttcacaaattttacttatatatagacatagaggcttacatttcaggtaaataagataggctccgtataaagcaatttgagaataagaaagttttatctctttttcttgagtggcatgaaaagataaacaaaatactttatttacagtagagaacacagcatattcaaattcagtattgtgaccttcacctcaactggattagccaggtagtatgttacttgcttagattcctgggtcagatgtgtcctgtatcctttagcttttctgtcagcaaaaagggataattaggacacagaacctgaattttaaaatggtttcagtttaaattaaagattcccttgaattaaagctgattcccttcttaaaggtgattgatatttatgatttttcattgtctttgttctcaaggagacttttattgtcttactgcaaaatttttgtaaatatctttgagttctgttttttctgagtttatgtgattaaggttttgagaatatctagatatagtacttctgactttttccagacaagaaacaagacatataaacatatacccactcacatttacaaagcctaggagatgaagtttcacgtaatatggactttggcttaattttgtctcgttcttataaataatcctttgaaaatgtgtctcagaaaatcattaacactgaaaaaggaaatatgaaagacttagaattctgaaaattataacatagtagactttttaatttattatcatttgtgatttcaacatttttgtgggattaccttaagagccatgacactgtaacactttgtaattttgtaaaagtcctgattgtcaatatatgcccagtgagggttggtaaagaataaatcttggccaggcacagtggctcacgcctgtaatcccagcactttgggaggccgaggcgggcggatcacctgagatcaggagttcgagatcagcctgggcaacacagtgaaaccccgtctctactaaaaataaaaaattagctgagcgtggtggcacatgcctgtaatcccagctactcagaaggctgaggcaggagaatcgcttgaacctggaaggcagaggaggtggtgagccaagattgcaccattgcactccagcctggacaacaagagtaaacctccatctcaccaaaaaaaaaaaaaaaaaaaaaaaaagagtaagtcttgataagcacacttgtttttgcagtatgtagatttaaatttaactttgtttctgggtagaaaatatatccagaaaaaaagccaaccactagtgctgatattagaattgatgagaacacaaagtccaaggacatgatgatatttaccaaggaaagagcagcttctgctgggtgtagtagctcacgctggtaatctcacaactttgaaaggctgaggtaagagaatcacttgattctcttagtagttcgagaccagcctgggcaatgtggcaagacctggtctctactaaaaataagaaaattagctgggagtgctggcatagacctgtggtgccagctacacagaaggctgaggcaggcagattgcttgagcccaggaattcaagaccagcctgggcaacatggcgaaaccctgtctccacaaaaaatacaaaaattagcttggtatggtggcacatgtctgtagtcccagctcctgtggtgggaggatcacctgagcctgggaggtcaaggctgcagtgagccatgagcatgtcactgtagcactccagcctgggcaacagagcaagaccctttctcaaaaaataaataaatacattgaagcattctttgaattggcagatatatgttttgaacctaaatgactggacaccttatagagacaacaaagtgctccctaacactaacttaatcaagatgttagccagtaaatatttgcttatgaaaagatgaaactttactaagaattagaaagtagcagagcttattactttgatcccatgtttatataaatcactttctttttttaattattaatttgcattttatagcttcaattatataattacatgttacactataagtgacatttgaaaaaattgtcttaggacaactgtcatatacatcaaggtctgtagtgagaatgaggaaggaccataatttttataagattaattttttttttttttttttttttttgtgagatggagccttgctctgttgcccaggctggagtgcagtggtatgatctcggctcactgcaacctccacctctgagttcaagcgattcttctgcctcagcctcctgagcagctgtgactacaggctcctgccaccacgcccgggtaatttttgtatttttagtagagatagggtttcaccgtgttggccaggctggcctcaaactcctgacctcaggtgatctacccgcttcggcctcccaaagtgctgggattacaggcgtgagctaccaagcccagccaagattaatttttttttctttttgagacagagttttgctcttgttgcccaggctggagtgcaatggtgtgatctcgactcactgcaacctctgcctccctggttcaggcaatttccttgcctcagcctcacaagtagctgggataataggtgcccgccaccacaccccgctgatttttttcatttttagtagagatggggtttcaccatgttggccaggctggtctcaaactcctaacctcaggcgatccacctgcctcggcctcccaaagtgctgggattacaggcatgagccaccgcatccagcccaagattaatttttaaatagcaatacttcattaaatatatatatatatatcttgcagttagaaactgtcataaatgtattacagtgcttggtgctggtttgttttgttttgttgtttgtttgtttgtttgagatggagtcttgctttatcacccaggctggagtgcagtggcacgatctcagctccctgcaaccttcacctcccgggttcaagtgattctcctgcctcagcctcccaagtagctgggattacaggcgcccgccaccaagcccagctaatttttttttctttcttttttttgtattttagtagagatggggtttcatcatgttggtcaggctggtctcaaactcctgacctcgtgatctgcccgcctcagcctcccaaagtgctaggattacaggcatgagccaccgtgcctgtcacatttcaggttattaatgagtatatttcccttgagctaaaagcatataacacagatttccatctataaataattttacatatgtattccaaagcccttggatgtagaggggaaatgggtaatatttagcaaattccagcctgtccttttcaattactaaagaaatacaggtatacctcactacttgaattcaggtgatttggatagcaatactgtatgtctgtagatttctctgctaaggcttatgtctagattttaccacattcaccaggcttagtgttcccaccctgtgggtagctgacatcttcacatagtttcttgtaataaaatataattaaatagtgtttaaatgttaaattagattcttcctccctctctttccctttctccatccatcctcagtttaattagttacccagtactttttccacacccaccatttggaggaagtttgtgacagagtgagttgatgagggtacttttgatttcactgtgtttcctattgcagtcattctctgaaaaatgatcaaagacattggaattatgaaagacagcaacagactcggcttcagaagatcccattgagtgtttttccttgcgctagttatatagtcagtttcccccttgtaaattattacagtgggggatttattagggaaaacatcatttaaaaattttaacggccgtgataaactgtcatttgcagttctcagctgacagtcaaacagctgcaatctgttagtgagcttttactttcagctgccagaggtctttcaactcctgttcccctggaaatgaggagggctgggctggacgcatagaagggaagtgagggttgaaatacacattttcccataccatatttttcatgcctccccacagtttccatagaaatgggaacataaataacaccccaccccagactttgaagagcaatcgtttatgtgtaaactgcagtagatggaccttaaagaggcacacaaaataagctaatcttagggtctttcctttacttgtgtttggccaagcctaatttcagatagattctcatttgatttactctgtacttaaaaaatgattcgatttttttaaatcaatttttagaaagtttgatattacctttttttctgaaatgagaattatcttgaacatactttgattgataggtatatatctgttgtttatgtgttaaaaatctagcaagcttggtgttctaactttcctctcatgtttgttctatccaagattaaagaaatgaattttgggccaggtgtagtggctcatgcctgtaatcccagcactttgggagactgaggcaggcaaatcacttcagatgaggaatttgagaccagcctggccaacatggcgaaaccccgtctctactaaaaaagtacaaaaattagctgggtgtggtggtgcgtgcctgttaccatctacttgggaggctgaggcagaagaattgcttgaacccaagaagcggaggttgcagtaagctgagattgcgccagcctgggtgatacagcgagactctgtctcacaaaaaaaaaaaaaaagaaaaaaagaaatgagttttgatttagggaatgctccaattgcatagtataaaaggtcttctcaaatagtcttattcttatgcattattttagaaattgccccacagaacagaggtaattattggctctgtcaaacatatcagagaaaacttccaaatttaattggttatcacaattttctcatttaggtaacaagaatatcctatgttaaatgcatttctatgtttttccacttatcagctctgtgtcatcacatatttcctgtaacacccgtacttgaggaaaatgtatgggcatagtctttatctgtttcttttattccaacatttaactaattaacaaattccatttgaatcatgagacagtaagaatatgtgtaattgagtaaatctgctttaggcatctactaagtattcagctttatgttaggttgcagtagataccaactgtaagtaaggcagaattttttccttaaggcatcccaatggagtttggaaaattcataccccaggaatagctcataacagccatatgtgattattacatgagtgacatagactgattcccatgactaggaaaacttgtttcctttccctttctactgtcacctttttcacaaagtccctttctcctgatttattttcataacttcctaaatgtcctttcaattgctacctttctccttttgtttgtttgtttgtttcttttttttttttttctgagacaggatcctgctctgtcacccaggctggaatgcagttgcacgatcaatcatagctcactgcaacctcaaacttatgggcttaagggattcttctgcctcagcctctggagtagctgggactacaggcacataccactgaccatgcctggctaatttttttttaaaattttttgtagagatggggtctcgctttgttgcccaggctggtcttgaactcttgagctcaagtgatcctttcatctcagcctcccaaaatactagaatcacaagcgtgagccactgcacctaaccctttcttcttttctttatcttcccttctactttagcatatacatgatttccagattcatatttgtaaaaccagtcttgatccttttactattttaaaacctcagtgatctcttcacatcattgtgacaagatttttcttttaaaagacagttctaacgtcagatattctgcctcataagcctggctaccaaaacaatccaaaaacttttattattttaggttctttcatattccaaattgcttctcatatccagaatggatgcaaacatctgttaagaccatctgcctggtttttatttcagaaaatatggtcactgagctagcaactaccaaaataggttcatgctttcagcgattggcagcaacctagacagtcttcattctggcttcagtgtattccttccggcctgctctgcaggtaccttatgccaggtcatctagctcctcacccaaacagaactgcttagcacattcagtaggcccacattttgtagctccatgcctttgcttacagaagtttcctttaggtatgaggaaagatagaagcaataacaagttgttccttccatctggaacttcttgtccctccctatacccctctcatagccctatcctactgtaatacaatctgtaatttacattaaaacaccccagtctacacagcgtgttagttagtctacaccttggatgtgagtgattaacatttgaaacactgataagggaatacatagtgtaagggtagttgtttggcattggaaataccctaatgaggagataactactgtaaatttaacctgcttatctttaaatctacaccagagagttttctagttagcataaaggatgtcagaaataatttcaaattggattgattagaaataccatacaggttcctctggcacatgaattgctcataagattctggcaagccaggtagcctaatgcctgcacagtgtcacccgaggcagagcactgttcgggcctgttgactatcacctaacagaagatgcttcctacctggtagaaaggtagtgaggagacctatggccatgcctgtcttcagtctttggaggcactgatatataccctcctcctcccccaccaaaacgaaacaaaacaaaacaaaacaaaacaaaacaaaaccctgacacttcggaatggtcaatagcaaaacctccctccaggacgatgcttacatgctatctcttccttaaagtctatcctaaatttcctgatggatttgtgaactcattctcctctacaccatcatagaatgaggcttatatttctgttatggcattaataaaattttaaaatttattgtaagtttcttgatgaaaggactgtgtcataactttctttgtatcccacatagcatgtggcatagtgtcttgtacacagtagatatttattataatgagcacatgcatgtacttaccaattctgtaaggaacagatccagctttgggtcatagggacactgggagccaatgtgtgagttcttagagttccattaattcactgttcatagttctaagggagtcaggagtaattgtccataactacatggctctagttagccattagtgcaaagacacactgggactgatgtcaacagcagaggaaagtagtgctgtctatgttgtcttctttcagaaactcatacctaaatgtatttcatactgctgttcggccaaatctggctctagataataaagaaggacaaatatttagggcagttatttctcttgttctatatttcctagccaatttgaagcagtatatataactaaccaagtacaccaggagaaaagtaaaggaggtgcaattatagcacacagatttaaaaaacaaagcaaaataaaacatttaatgttagtaagatgatagtatagtataatagttcaaagcaaggatattaaacccagactgcctgggttcaaattaatccccactttactagctgtgtggccttgggcaagctatttaacctttctgtgcctttgttcttcttctgtaaaatgaagatgatagaacagcacctacttcagagatgtgaggctaaaatgaattcatacatgtaaagcatatagcactcagtgcctggcacataggaagtgctggatgtgtttgctgttcctgcagtgatatggttaaatcatagctccaaaggcagaagtatgctaatttcagtcagtgtgcagtccttctgtctgtgtgctttgcagttctccgcctccaactgagtaatcttaatgccttgaagcccccaaatattggtgcttatacctttcttgtggaacctgtcacattctaccctaaattatataattatttgtaagctccttaaaagcagaaactatcttctttgtcttcctctcagcacccagcagaatgattacataacagccttgcttacacaatagctctttgctaactatttggggaaactatgaacctctgtgaggttggtccctggaggccctgcaccttggactggttcctgtgtacctctcgtactcttcagctagcaatccctctcctcactgtgctccagcaactggccttaagtcccttaaacatgcatccttttccaaaactggcttgatgtgtgtgtgacctgtgcagtcacataggtcctcatacttggttgaatgctctatcactagcttgaaattcttagtttttgtgttcaatttttatcttgcactgagcctgcaaattatgtagccggtcttgctcttggtcatcctgtgctcattgttccctgtgcctggaacaccctttctccctaatcctcactggctaacctactcttcaaggctcagcttcattgtcattcctcagagaagcaataaaaattagagccatgtattagtatccctccacattttcttctccctcagagcacttaacttactttgtaaatacagtatttatttatattgtgattatttcttttaagactttatcccaggctgggtgcggtggctcatgcctgtaatcccagcactttgggaggctgaggtaggcggatcacgaggtcaggagttcgagaccagcctggccaacatggtgaaacctggtctctactaaaaatacaaaattagccagatgtggtggcgggcacctgtaatcccagctgctcaggaggctgagacaggagaaacccttgaacccaggaggtggaggttgcagtgagccgagatcacgccactgcactccagccggcgcgacagtgcgagactccatctcaaaaaaaaagactttctccccaccagactgtaaactcctccaggggatagactgtgcctttgttccaggacggctttacctgctacatagtaaatagtaaataaatatttgttgagtgagtgaatgaataaatcatttttagaaatgccaagttgtggccagatgcaatggctcacgcctataatcccagcactatggaaggcttaggtgggcggatcacttggggtcaagagttcaagaccagcctggccaacatggcgaaaccctgtctctactaaaagtataaaaaaattagccaggtgtggtggtgtgcacctgtaatcctagctacttactcgggaggctgaggccggagaatcgcttgaacccaggaggtggagcttgcagtgagccaagattactccactgcattccagcctgggcaacagaacaagactgtctcaaaaaaaaaaaaaaaaaaaaagcaaagttgtatggataagcttttcttcccaagctaaaaagttgatgtataaaaatagcaattcaaggccaggtgtagtggcttacacctgtaatgccagcactttgggaggccaaagtgtacagatcacttgagcccaggagttcaagaccagctggggcaacacagtgaaaccccacctctacaaagaaatcagccaggcttggtgacttacacctgtggtcccaactactcaggaggctgaggtgagaggatttcttgagcctggaaagtcaaggctgaagtgagctgtgattgcaccactgcactccagcctgagcaacagagtgagaccctgtctcaaaaaattaaaaaaaaaaaaaaaaaaaagtcagtgcaatcttcatgcaatttaatattgctagtgatgacttttaaccagttctacttactgtctttatagatggatgaatacagtaaaattccccatttttcttttccactgtttgttcttctcatataatctggtatagtaaagttgaatctctctaaagtcagatttactcaggttgtcttatacattagtttcaaattaaatttcttagagcataaatgtctacagccttctgtctcttgtatttttagcaagcgacatgtatttacttttgatctaattgccagcgacaattgacataaaagtaatgcttcaggtttcttagcattttatggtggaaaggccagtactatgataatgaagttaacacttgataataatagagaacagtgtcctacttggttttcccatcattctttctctcctctcttattgtctgtgttcaaatagtttaattaactcactctgaatgcacagctgtatcagctttctgtggtccaattttggaactatatctgtttattctactccctggaatcacaccaatacaattcaacatgtaaccagatttaatgcttgccatcttactgtctcaatttttagtgcttggtagtcattccattactctccaaatactgtactaaaatttttaagtgataaatttctaaccaaaaacttatttacaaatggatttctacttgagatttacaatggattttgagcacctcccccaaaagaaataaaaaacatccaacatggtatactaacttgatattattgcttcttaatttttgcaaagaggaaaagaatcagaatttgcataatttagccccacattgagaataatcaatacagtgagagaagaatttttattgcttaaaagaaaaacaggctaaatgtcctttttttttttccttcaagtgtaaggaatctgagaaaaacagattttaaaaccaatagaaggaatggttatgatccagcagcaactgctgcatgtgggtgaagaaaagaacccagcattatttgtacaaatccataagggatgcagtgggaacagaaagaaacaaggaagtataggaaatagagaagaagggcactcagtgaagatgtaggcctcaaaaaatgttccatctaagcactgactgattccagtaccttaaggtgatctgctttaagctataaatcttctgagtggtttatgctctcaatgcttttttttcagaaggctgtgagaggaggaaaaatatattattttcagtctgccccctcttaagactttatggaattttaagcaggcttctcctagagttaaattcctgattcaaccaccccagagtctatttggctatctgtctctctctctctctcttttttttttttcctagcttgcccagaaagattaaagtaaaggtattctttctttttcttttttctttttaatctcctacgttatgcctggtaatgtggcagatatcttaggttcattacctctcagttatgcattaacagcacctccatccttgagctgattagctcagttaactgctgcaggctactgacgaggcttatcaaaggtcctaggtttgagagctatgcatgttggctagatgacaggcaatgtagatgatagtcatgtaacatagtgtatgactaaggctttaactttggtgtcaaaaagaccttttgggtagctgggtgcaggggcatgttcctgtagtcccagctacttgggaggttgagtcaggaggacttcttgagcccaggagttcatagccagcctggcaacatagtgagacccaatctcttaaaacaaaagcctatagggtctgtcattattatagggcctgtgtgtgttacttagtctttcttggtttactcaatttataaaacggatatagtaacacccagtttctttgtgaggcttaagaaatataaaaaatgctaaatgatggctgggcactgtggctcacgcctgtcatcctagcactttgagaggccgaggcaggtggatcacctgaggtcaggagtttgagaccagcctagccaacatggtaaaaccccatctctactaaaaatacaaaaattagccaagtgtggtggcaggcgcttgtaatcccagttactcgggaggctgaggcaggagaatcgcttgaactcagtgggcagaggttgcagtgagccgagatcatgccacttcactccagcctgggcaaaagagcgagactccatctcaaaaaaaaaaaaaaaaaatatatatatatatatatatatatgtgtgtgtgtgtgtgtgtgtgtgtgtgtgtgtgtgtgtgtatatatatgtatatatatatgtatgtatgtgttcagtgcttaggtcagtgctgcagcatgcattttgtgctcaattaaaggagatggtcatcgtagttgtttgtgttaccctattacaaaacataaacaattcaagttctgagtaagaggtttaagtaaattgctcataaaattatatagctagtatttggcagagaaagttttcaaatgcaagcgtgtttaatttttttctttttttttttttcagacagtttcactgagctaatttttgtatttttagtagagacagggtttcaccatgttgatcaggctggtctcaaactctcaaactcctgacctcaggtgatccacctgcctcagcctcccaaagtgctgggattatgggattacaggcgtgagctaccatgcccagccaagcctgtttaatttctttctttctttcgtttttttgttgagatggagtttcgctcctgtcacccaggctggagtacaatgccgcgatcttggctcactgcagcctcagcctcctgggttcaagcgattctcctgcctcagcctcccgagtagctgggattataggcatgagccactgtgcctggctaatgtttttgtatttttagtagagatggggttccaccatgttggccaggctggtctcaaactcccgacctcaggtgacctacttgcctcagcttcccaaagtgctgggattacaggtgtaagccaccgcacccagccagcctgtttaatttctaaaccacctcaaataaagtatcaaagagaaactgctgttcaaataattgtgctcgaagaatatggtttttctcttctttaaaacttgattttattcttatatccaagctgcttatataaatagattcttgaaatattttgggacactaaaatagtccttcctgatcttacaaatttcttctctcctaaaatttatgtataaattggttgtttgaaactcagaatggatattcccttaggaagtggtggttgtgttctcaggccaattcataaaagcttctctagcctgtctcttctccctttctagtgcttaatgtttagttcagtggttttcagatggacagtatatcaaaactgcctgagtagctttgtaaagataaaggtacttgaacaaaaaaaaaatgagaaagaatgagtaagacctcgtgtatgatagcgcagcaggatgactatagtcaataataattaattgtacatttaaaaataactaaaagagtataattgggctgggtgcagtggctcacatctgtaatcccagcactttgggaggctgaggaggtcagatcacttgagcccagggtttcaagaccagcctggtcaacatagcgagaccctgtctttacaaaaaatacaaaaaattagccaggtatggtggcgggtgcttgtagtcccagctacaggctaagaggtgggactatcacttgagcccaggaggtcgaggctacagtgagcggcactgcacttcagccgcagccacagagcgagaccctgcctcaaaaaaaaaaaaaaaaaaaaaaaggagtgtaactggcttctttgtaacacaaaggatcaatgcttgaggggatcgctaccccattttacctgatttgattatgacacattacatgccagtttcaaactatctcttgtaccccatatatagattaaattactatgtatccacaaatattaagattaaaaaaaagataaaggtgactgatcatacctcagatcttctgaatcagaattttagggtgaatgtgctcgatccatcccagcagaagcctgaggcaggggaggcatgatgtagtaaaggtactagaagaagtcctgtgtggctggagcagagaccggttgtctttaaactcttgattgtgatccttgtgaatgaaagtcatatgagccgataccaccaatatatgtatattcatttttaaataaattagccacctgtactacaataagcacaaatattttttaaaagatgaaataaaaatagtccttcctgactattttcatattctaaaaacagaacatgaaattctaataatcaccttttgctttctgtacctatttggatagttttatgtactttctgggatggacaaaccacacttttgcaaaatataggcaaagagagtgaagggaaggtagatagagactagattctgtaggaccagcagagccaagtatttctctatcctaagtgcaataggaagcaattggaaaatgttaggaaggaaaatgatgtcagatttgcatcctggaaaaaattactttggctgcccaatagcaaaaagatttagtacagcaactatgaacatggggagtccactttggaatttatggcactagttctgatgaaaggtgattatgccttgaattgggcattgccagtgaagtttaaaagaaaaacaagatagatatttttgaggcgtacagtatagaatctagtgatggattgcctgagcattggttgggggagcagacaatggtgacttgtgggtttctggcttgagcttctggatggaagatgaacagtgggagaagaacaaattgggggtagaaggtggggtattagtccaggtttaaatatcttgaatgttaaccatccaaatgatgataggaagttcacaattggatatgcaggctaagcttagtagaagttctgggcagaaaactataaatttaggagttgtcaacacatagtacagaaattcctctacctccagatattatttattgataggaaatatctaaagcagaagtgccaaggagttccacaaaaatattatacaagattagacttacaggactgaagatgaggaattaaaaatgaacaggtaagcagattctataaaatgcaagtctcccaaaattgctacagcattgggaccacagcttatactagaatgtggcaaataaagtacaaatcagtatttcagaagctctcaaagatactttgatgagcatgctacattctggagtaagccacaaacattggaaagtggctcatgtcatataagtattcatgaataaaggtccaggtacatgtcacaagtgtgcacaccactaggattgagtaattgggaaagctagacatgtcagatgagattaaaacaagtacagcaccatagattgtatgttagtatgaattcaggaggagaatgcctgggaatttgatgtctgtaagaagccttggaaattatgttagagttgcaagagagaagtatgtcctttgtccccacccccttaaaccattatgttccttaagtattagaatacaactaataatcatttacaggctctaacattctctgaaggtttcctcctgcacccaagacacatggggcaaaatatcattgtttaatatgttccctctcctcctagtgctaaaagcttaaaaggagtcaaagtgacttcttttgctgaccactatgaagaggattaagtgaagcctatagggcgtgttcctcctcttgatggatgccttctcctgattccttttcatctgtttcttctcgagtgcattatactactgcaaactgttagaattttggttgccactgatccactttatgtccagatcttgataagtccttgcaaaaataactgtgactctgacttggaaactctcagtaacccccaaatttccaaggaaagtgatactatattacatttctattttttctctgtccattgattaatatattaaatgagataatttatattcatcctaagaaactgtctgaagtgagcaagagtagcacataatggctagcacctttggcctattaattttctaggcacctgaactgagcaccaggaatcttcacttctgaaaatgttaacttgggtcatatcagcctttaaaaaagaaaaacacagtgatgtactttaccagtatttgcatccataaattaatatttttgtatctttcatttctgaattacagaagcagattcatcaaaccctgaatgatagctcttacaagtgactggcccaatgttaaaactgagcacaggagaaatgctctgtgttttaactgggcaaggaagcttgcataaaccagtcatcatgaaaatcctcctcactgaggtgcttctccctctccaaccctctgtcccacaaatttcttcttgatcatctttgtaccttttataaatatctgttattgcgcttatgaaactagatgataactagacacatatttggcactacgtctagactgtcagcttcttgagcagctttactttaatcatctggtcccaggcagtagagcaaagtggttaaagagggcaggctctggaggccaactggatttcatttctgtatgatcttgggcaagttacctatcctcaacttatttgtaaaatccaaataatacttccctcatggagttgctggcaggattaaatatagatttttctaaattaataggcttaaaactgttaggaaattttttgacttgaaggaattacatacttagtggcaattactgctaaccaataacaaagcagagggaagtggacatctgaatacatcaatgcagtgctaaaaaccttgcacactggtccaggcctctcttcttgtctttattgatagtttagctcagaggcttttagtatgaatcccacatcttctcaagcatgtacccctcaaacctaccagcccccaacatccacacctggtttagaaaggtttgtaggcatcctgtttgtcacagtgacaggcagccgctactgacatttaataggtgaaatcataaatgggcccagggatgccatgggctcagaaatggagagcggagtctacaccaaaaattattccacccaaaatgccaataatatcttaccttgagaaacactggtagtgcccagggtcttttctctactaaaatgcaaaaccaacttttcacaaaattaatatactatttcataaagtcagaatatgccaaagatcatgccatatatattacagagcatagatcaacttgaaaaatctttacgtatgtattctgttatttctcttttctgtgtgtaagttcttttcaagttactacagtgagtttcaaatttgttatttaagagttctattattctgttcattatgatccgaagtttaagatctgcggtgttgaaaagcactcctaaatatacaaagcccttgaactcctaaataaacaaagcccttgaactcctaaatgtacaaagatcttgtttgggccaggcctggtggctcacacctgtaatcccagcactttgggaggctgaggtgggaagattgcttgagccttggattttgagaccagcctgggcaacatagtgagaccctggctctaccaaaaaaaaaaaaaaaaaaaaaaaaagctaggcatggtggtgtgcccctatagtcccagctactcaggaagctaaggtgggaggatcacctgagtccaggaatttggggctgcagtgtgctgtgattgcgccactgcactccagcctgagcaacagaacaagaccctgtctcttaaaaaaaaaaatgatgattgagtttgataatcaggaaacttaaccaaatcttatatgtaagcaaataaatatgtttttatttgtttgttttattttgagacagggtctcactctgtcacctaggctggagtgcagtggcatgattttacctcattgcaacccagcctcccaggctcaggtgatcctcccacctcagcctcccaagtagctgggtctacaggcatgtgccacgatgctcagctaatttttgtatgttttgtaaacacaggttttcaccattttgtccaggctggtcttgaactcctgaactcaagtgatccacccaccttgacttcccacagggctgggattataggcatgagccaccacacctggccaaaataagttttattagaaataactcactttgggaggctgaggagggcagatcacttgaggttaggagttcaagagcagcctggccaacatggggaaactccatctcaaataaaatacaaaaattagctaggcatgggtggcatgcaaaaaaaaaaaaaaaaagaactaatgcatgtgaaattcaaatattagtaagtattcaaaataagatatgaaagtaagaatacaaaatagggtgatatcactggttgatatgattagtgagatgaacattattaaggcaaattcttccgataattattgttatacaacatgattaatatatattcagtctgaaagagtcatatatacaaatatgaaataaacacctcaaatgagaagaagagagaaaacatggagaatgaagaaagttgggtgtattcttttcagtcttcccctcccatatctccgtctgaggccagcatggctaatattgagaaagagtaaggcaaatgagtaattattgtgctctgtcttttactgttattgaaggtcactgtttaacactccctcgccattcccctaaccactcccctttgccttaaattcattaagctgtattctttgtatttcctgataacagctgacaaggacccactctcatctgtaatgacaggtgagggtattgatgataagtagagttaataaagcttctccagtgatttagaattataacgctctgagtattatcatcaggggaatagatgaaaaagcccatttcattttgtgcagtgtccttcaaactgctggttatgaaatcattttagagggtctgtgaaatcactgtggaatacgatgaaacgtaatagaaagtatcagcagacactgtgggagatcggtcagagcggtggggaaaaactatagggaaaggacgcaaaccttctgaaaggtcagaaggttctgcagagccccaggggagaatagctgaaggcagctgttctgtaaccctgaggcattgggcaaggagtaggtacaaggcagtgtaggggaatttatcttaaacaaacttgtttacttatgttgaccaggaactgacctttgatcatccgtggggacggtccccctgaaaggggaacaataaatgttaattacctaagaggtttttaaatttctttctccagaaagaaaaatttcaagcgtctgaatcccattcagtattctctaaaataaaatcaagtttgtcctgaaagatggtttaaaaactgaaaatctattttctttgattacctcataaataacaagagtttcatatcagctctcctgtctcttcctcctccactcttttcccctctttcacattgtgccaatcacacaggtggatgctcagtatcaccccacagcacaagataaataagcttggaaggtttcctagcaacatattgttctgggaacctgctctgtttccctgaacaagatgaagccaaatatcctagaatctcagccagatgggaaaggattagcttattgagagtgttattgccttttttaaaaaaatgtttcactttgaaatgaacctcttaatataagtagcaaaagtgacttttaaaaggacatgtaaaaatatccctttaaaaggacatttttttctcttacatgtaaaaaaaaattgataatagtttgaagtttaaaaatatggtttcagaattctctaggcacaagcttccagtatgtaattcagtcactggtgagtggatccattttagaaccatgtagaaaatacttccacatggaactaattctcagcctggtgtccagtggtatggtattcctgctgtaaaaatactgaaatacttccgatctggtgggaaaatggctcctggagtaggctctctcctcacaatacctttagctgctccccttggcccttgtttctgctcctagggaaacattggagacaccttgttactgcttaaaaccctgaagcttcccctttttctatagctccagggctattttagtgctagtgatttgcaacttcatcttcagagtctatttttggttttctcagtgtatgattaatgtatatagagaaaataaaagaaattgagactgctatcaaagccaagaaaaataatgttgtcgttttgttaacacatgattgtgtatatttcccttgtttatctaatgatctgtgaggctacacagttggcaggtggtgctttcctttctattgcactctagttggtcacagtatacttgttagaggtctctggagatggagtaataaaggattcgtgtttctcataacaatattcagcagtggctttgcaattcagttacaccctggaaaatgtcctcactccttgtttggctggggagacattcccccatcagccagatgaatattctcataatgtggttgttgactggtttctatcatctatcaggtttggactgagtttgtgaaacttcccaattgtggtgagaagcagataattctagtacttcatagtgttcctggataagaagaacaaagtaattagaataagatggggaatgacacctggagtctttgttttttatgtaacaaattatctggccagatgccagagaattagtactgtcctcattttaatgaaaataaggaaattgtgagataattttatattcatgctagatgctttccattctcttttgctctctcactcatatgtatatgttttctaaataccatattttaaactcaacaaggaacaatctgttgagggcctagtatgagccaaatactgctaggtattatggcagatactgagggcaacacatcatccttgccttctcagagtacgcaagaagtttgcaacatagcacgtttgtaatcttaaaccaaacaaaaacattaaggaaaggtgttgctgtgtaaaggaatcataggctaggcacagtggctcaggcctgtaatcccaatgctttgggaggctgaggaaggaggatcgcttcagcccaggagtttgagaccagcctaggcaacatagccagaccccatctctacaaaagttaaaataaaataatataagtaagggaattctataactttgattgtccaaagaaaggctaaaagtagatttaatatgtattatggaacagaataagttctaatacgttaattttgattgaatacttattttaaaaaaaattttaaaaatgtccataaaccaggcattgttttagatacctctctgttaactcatttaattctcctgacaccattatgaggtagaaattttgtttacctgctattttatagatgaagaaactgaggctaagagagtttttttgtttgtttgttttaaaagacagggtctcattctgttgcccaggctggagtaagtggccgtcatagtgcactgcagcctggaacttgtgcgctcaagcaattcttctgtctcaacctccaagtagctgggactatagatgtgcaccactgtcccctaagagaggttaaatatctgtttactgagggcttttatactacgctgtgcttatttgtttatttttaaaattctaagagtccataggaatctagtcttttttcagaaaatagtaaactactgtcttttgtggatgacataattttagcaagaaataaatgggttgtttagatgactttctattatctcatacagcataatgattctatatttgagttttcattgtcaaacactaaaacctcctttgttttcagtgtactaactccattttagaatatttttctcttctcttctttttttttttttttgagactgagtctcgctctatcacccaggctggagtgcagtggtacaatcttggttcaccgcaacctcagcttcccaggttcaagccaggctcatgcctcagcctccagagtagctgggattacagatgcccaccaccatgccccgctaatttttgtaattttagtagagaccgggtttcaccatgttggccaggctggtctcgaactcctgacctcaagtgatccgcccacctcagcctcccaaagtgctgggattacaggcatgagccaccacgcccaggccattttagaatatttcttgtagctcaattttttacttatataaaataataattttcattttcaacataatagaaggatatgagtgaattatatttaagaaagttaaaattaatagcactattaaatacattaacaagagaaggttgtgacatcagcaatattatttataacagaggtggacaaactgtagcctgtttctgtaaattaagttttcttggaacacagccaggctcatttgtttaggtatcacccatggcaggttttgtataataatgacagagttgaatctttgcaacttagactatatggcccacaaggcctaaaatatatactgtctggacctttacaggaaaagtttgccaacctctactctggaatctctatttttctcctaactttgagttgagcatgttcccttagaatgccagaaatttaactagcaaacacacctgaattttttttcataaatggtgtccttgtctaacatggttttcctcaaatccctgcaggtaccaaccaagaagctgaagaaatatgagaaagaatatcagacaatgcgagagagtcagctgcaacaggaagacccaatggatagatacaaggtatgagaaatatgttgcacctatcaaagtaccttcttttttgttttaaatgagactgagtcttgccgtgttgcccaggctggtcttgaacacctggcctcaagcaatcctcccactccagtctcccaagtagctgggattacaggcacgagccaccattcccagcaaagtacctttttttttttttttttttttttcttaaagcagcagttgtggcaagttcaattccctctgttcttccttgattgatttagatgctctctgatcatgctaactgtccaggtatgttttcatttcaggagactcccaaatagccaaccataatatttcttttctttcagtttgtatatttgtaggtaactccagctgttgcatttatactgggaatcttcataagaagctgagagaaagagaggggaaaaagaaagtggctttctactttcaaaaatgaaacaaaaaggaaaaatggcaaagtactgttttagctgtgcatgtcatatccacaaagacttttagcaggtgaactgttccaagactgacacaaggatgtttcaaacttgcctctgtctgtagaaaatgttaaaaataccaactcacttggaaggaaaaataaaaatcacaaaggtatattgagcacagtagtggtgtttgttgcaacatttatttccacaaatgaatttatgaacaacagtgatatttgagttaaagtatgaagtttcagaatcaaaataatttcattttaatacgttcgttaattgtgaatctcttcaatggtaattagcaacactgttcccaggatgcaaagttgggaaacacttatttccaacttatttttttccaagtaaaatattatctctcttcaacatgctttaacttttcagactcacacagatacgtaacagctccttctccctccatatcaatacactaagataaaagaatactgtattttcagcactgagcagcagtgccaaaatctcctgccaagaaatggactgtgtggcattattaattaaatcacccacattgggatgacttccacttttgtaactagagttatctttatgtggtcagagctggacataggcagcatagtcacacagaacatcttatctctgttgctgaattgaatagcatgggatgtgtgcagaggaacatggtgggagtatgtaggttttgtagtcagacagacctgaactcaaatcttgctcattttttagagcacaggatttggactccaaattgagggttttaatccccatgccaccattcagcatcttcgactagttattgaacctcttcctcatctataaaagatatagtgtttctgattccttgatggattgttacaaggatgagggatgctgtatgttaaggactcagctcatagttgtgttcaataaatggctgttattttatgaagcctactactacagattatgcaattattactagaataatgccaccttatgtgggtcttcccctctagtcccttattgattgttcttatttctctcaagtattgccaaccaataatctccccttgcttatagaagtggttcaagatctgattataaaatcccacatacttctatagcagataactattaacagataatgtttgaagctaattttcaccaccaacatcccctcaataaaaccagcttttaatgtaaatcacatagcatgctgctttagaaaggcttgaaggtagtaattataaactattattaagcatccaaaatgaaggtctccttttgctaatatcattcagattttcttattactacaattattatgaataaattctgtgaagagtgctttaaaataagagagaaatggaagaccaaacttgtacatttaaaatcaggctggaattgaacttgttattgtgtcttaaatccttttttgtgccaaagcaggtatgtatacattaatagtaagatgtacattatttttaaagtacttataacatgtaagattatcaatatgtatagtttttattgagagatcaaagtaggattaaacttcttgttttgaaagcaggcattactttttaagttcaagtattgttgattcttatttacacatatcggataccctctattgctatttcttttagattattgtgataacttgtcagtacattcatctaatgtctctatactcttaataatgtctaggcatttgtcctggtaatacacttggtgaatttatagttcttagattataattacatcttcaaggtggcagtcaacaacataagtttctaaccatcaacatatttggtttgtaagatgatcaatatgcagtttaagaagccatattataattatcttaattaaagtagcaaagttagaaaataccttttacatcttctaaatttaatcctatgaagaataagatctctgtcctgggaatgagcactttgtaattcatagatcttggactgggaacccagttaatgtaaactcttaaaagactgacttgggaagatctttgagggcattgagtgagaacttgcaccagttcagtaacaacccctcctcaacattagaatctatattgcttaaaaagtcatttccacaccctagcttgccatatgacaagagagttagaaggttgtgggaaatttattttttaaagcccacatatgttatataataagatattttaagaggtatttcagttcagtgctatttcttttggacatggtggcatatgtaaaagggctatcacagggaacctagaggtgggaatacagatccagcaatgtgaggtagctctcaacagtcatacttcttgctacatctatgtaaacatgtgttttatgtctatttttatgacatatgcagatatcttcatggttaggttatatcgctgtagtcacctttattcaacacttaaatctcaaccacaaagagatgaaataatgttagtataaatttaaattttaaaactcgacatatcttgaaaatcttctggaattaggaagtagtgatgattgcacaactttgtgaatatactaaaatcattacattgcacattttaaaaacatgaattttatggtatgtgaattacatctccaaagaaaaaaaaaagcagaatattccaggaggattgtcatttagcctacccttttcctttcatgaaccctaaatcacaccagaggtacctgtttagaagcaggagggagagcttcctgttgaaattagagctaattagtgactattgatcttatatgtgtccatatttgcagaataaaagccaacacagtgggtggtacattaatttttagtgatgcccattaatttccaggtagaacatatgttgtacattatatgtatacacacatataaacatatataagtaggtaatacacacacatatatgcactgcctgtgctacctggtcttggcatcagtttatattttaaactcagtgaacaccataatgactgctttatagcctttactctttctgtttttcttcatgactagattccaagagacagaaaggaaacttttttgaaagaacaatgtagaatgtttatttcaaatctcttttatcctctttcttaacttgcacctgaccaggtttgtgtaaaattctttgtctactctaacattttggtttgtaaatttagtgattgatttctaatgaagtgaaattaggataaagatttgactgtagaataagcatgttttcatttttatacaggttcccagaagacacacatttatcaatatgtgtagctgttttagtatattttagaaactagtaactaagcccttaataagcaaagttaccaatttcagaaattaaaatactttctatcttaaagagatgaattgtttctgttgtgaggaaagttttctagtgatggtatcagttgctggtactttttggagatctgtagccttcatctacctttggagaacgatatgcttttctggtttaattaaataactatttgcacaaatgtgagttaaggcttaaaaacacagctaattggccgggcatggtggctcttgcctgtaatcccagcactttgggaggccgaggtgggtggatcacttgaggtcaggagttccagaccagcctggccaacatggtgaaatgctgcttctactaaaaaatataaaaattagctgggtgtgctggcaagcacctgtagtcccagctactcgagaggctgaggcatgagaatcgcttgagcctgggagggggaggttgcagtgagccaagatcatgccactgcactccagcgtgggcaatagagccagactctgtctcaaaaaaaaaaaaaaaaaaaaaaaagaaacgaccaggtgcagcagctcacgcctgtaatcccagcactttgggaggcagaggtgggcagatcacaaggtcaggagaatcgagaccatcctggctaacatggtgaaaccccatctctactaaaaaataaataaataaaaatataaaaaaaaattagccaggcgtggtggtgggcacctgtagtcccagctacttgggaggctgaggcaggagaatggtgtgaacccaagaggcggagtttacagtgagccaggatcacgccactgcgctccagcctgggcgacagagtgagactccgtctcaaaaaataaaaataaaaatacaccccccccccacacacacacacagctagttaattaaattcagtgaatctcccaaagcataataaaggttacctgttctagatgggaaaatactaaaagaatctggaatgcttaaactctcttgggtttgggacacagacattattataaatacataatttctaattgaagtgtcttatccatgttcagtacaattaaatttagaatgtttaacctcattcttgagattaaacaaagtaatttttaaaatcaaaatgtaatttaaacaaagaaaatgattcctctatgtttccacagagttttttcttgcacatactggtttttgtagagcaattgctcctacatgtaatttcaaattaagctattatgcatagtaaaaataatacaaatgaaatatttgaaataaagcttaattgtacttttttgccatccttaaatatctaatgcaatagtttagagtaattttcacatttcttttaaacttgacaaataaaagtttaaattagtatacatttcttacctataaaaaagagggagtagactttttaaaaaaactgttggaccctttcttactcaggggagtcaagataagtgaatccatctttgaaaaatgtttttctggctgggtgtggtggctcacacctgtaatcccagcactttgggaggccaaggcaggtggatcacttgaggtcaggagttcaagaccaacctggccaacatggtaaaaccctgtctctactaaaaatacaaaaattagctgggtgtggtggcacataacctgtagtcccagctactcagtaggctgaggcaggagaacctcttgaacctgggaggcagaggttgcagtgggcagagatcgtgccactggactcctgcctgggtgacagagcaagactccgtctcaaaaaaaaaaaaaattttttttctgccatagcaaataaacttacattttattattttttcatatcccaaaaactgtgttggcttttggaaatagtatgttatgaaataatgtgcttttaaggaatagtaatagacacaaggatggtttatatatgcctatgataacttaatgataaacttcagaagtcttccactttctctttgagcttggataatccagagagttcattgttataggatggtgaagatgcaaaactaaatccttttggcttctcaagcaatatagctaataaggagtgggcgatttctaacaatgctggtctgctagagtcccttatacttaacccttgggggaagaatatgctttaggaacactaagaatttctagtatgtttactggtgatcttcagagttttcaagaaactttcattaatttttagaaagttttcttttctgtttaagtattactgagaaaattacctgacactaatatgtttctatatcatctagaatgcatctgctttttgaaaatttgatttgtgtactagagtagagcaaggatctgcagactgtggtttataggccaaatctggctcactgccagtttttgtaaaccaagttttattggaacacaaccacacctgtttatttatttatagtgtatggctggttttgtatgacatttgtagagttgagaaatttcaacatagaccatgcgacctgcaaagcctaatatagttactttctggcaatttacactagaagtttgctgacccctgtgcaagagtataacctaagatagttttttaagcgctgaaagaaatgcagtctgtttggccagctgtcatttatcactgacaagattttgtttttagtttgacatttaaaaatttgaaattttccactacaaagataaaattggatgtgatgagtaaaggagggaagcacaaaaccttcaaatatccatattttctttctcagatcttcattatggacaacatagatatttaaacattttatctgtaggcatttgaaaacttgaatatgatagctgtcaactcttttaaaagaggtatccaaaagaaaatatgtgagagttgagtgtgttgttgctaataaatttgcactgagtcttttaggaaaacattttctcctgacccttaaaagtctttaaaagcatgtgccaagaattcatcatagcagcagacaacacccaaaatattgagctagggtttataaagccgcctccctcctcgtcattttttcctttaaagcttagtttctttacttttaattaacagttcacatttctctggtttctcatcttgaaataaatgacgttcacaatcccttgaaccgcttcacccagacttcagcccccaggtacacatgagatccaggatccatttttcttttgcattgccctgcccagcaatttcattcttttgtctgaagatgaactattttgcaagatttctgaccttgtcatataaggaagttccttccacccagctttaacaacacagtatcaacacctcacaccgtagttccttaatagtcccacatacagcattttagtcattcatgcaaactgtaaacagcaatgtggagagggaggagtttgaagatatgagtcttcctgagttgagacttgcccactggctacctcaagtatctttgttccattgaatgtttgcggtcacagagagaacttagagttatatgacactcaaaggaaaagcaaaagagcattaagaagtgtctgtttttgttattgccatttcataaatattttagtaggtgttcaatttcattggatattctttttttttaattgtctttgtacctatgattgaaaacagtagttggtctatgacttttgaggaggtaagttttttttttaatctatgtatgtctgtaacatcagtgtctgtctctttgaaaaatgcagtatcctcctcccaaaagttactaaccaaactttcccagctgtacatctcctatccataaggggtgaaactatgaggacagttgttatctgctttttgttcaaacggtgtcagttgtgtgagatggggagtatatgtttcagacagtgtgatgtgagttttaagagttatgtaagcagtgtctcctgtaatcttttctgaaaggcaagagggagccagtttgcctgttttgtttacaggctttgagcatttagcacatctgcttgtgcaaacttacagcatgtgaatttctctgggctgactgaggttattggggctgactttaagtctgtcttccatgggcaacccttgtcaacatttcaaaatgaaccaagcagggttactgccttttccaagaccatcaaaaccaaactctcttctccattctagtatacaggcaaactttttctagaattggtcagtattgaaaacagttttggctccttgagaagaactgtaaaagacagccacgttaatataagctctgtttagccctcagtaggtaagtgtgggcaagttctttgtagaaaatctccatctcagtagcagggtctcactgtagtgctcagtagcactcaccctgggttcatactttggaggatgatactgcatttttggccccgtagcttgctttcccacttgtctgtgagtgcagagcaggagtctgacacttcccactgtgctgcttgctttgcagacactaaattgaagcttcttgctaaagcaaaagccagtaggcgtgccctctaggctattttgctttgcagggactctgagacactcagtttctcccaaatcttttcccacccttgcccttgcccctttagctgtgtgtctgtaaggaagggtttcagttgcaacagtcattgtaatgagaagttactagtcagaatttcagctgaactcacacctctttcttatataacagataatccatcagacatttatctctaatcaacagtgaagtagctacctggtatgatttctaaatacttgaacaaagtacttttccatgaacatcctatgactttacttggaggttactttaactcaattctaagcatgtaattgtaacctgaaaaactggtagtggcaacattttcacttgtgccaaatgaatgtaatgtacataatagtcgagggagctttttgtactttggggttatacaagtacaatttcaatagcaataggatacttaactcaggaatacctattgaagtagtcttatcttagtttcttgaagatatttatcaagaaatgagaaaaatctcttccctggctaagcagcctgcattgtgaaatatgtcatgttgaaattgtgctggtattgttactctttcctggctgggaggaaatttattgaaaaagcttctcaaatctttttttttaatctaagtttcctatatgttttttttccatgaaaaggagtaatagatatatcagaaataaaggctaactctccagcccctgctagaaattgtgttgcttaggcaaagattcaaagatttcattgtagaagctctggctttttagaaatttgttttttagtctccacatttattatgcttctgtgggagggtgtaacttctgtagattgaggggaacagacagaatctgatgagtacaagttgcctctacaagagcattcacagtcttctcaggaacatctagggaaagagttcctcacaaggcaccacttctgaggggttacattatatcttggtcaaaaaggaggatccaatatggttttgtgtagaatatgaccttctaacagaagtggacttaaatttttttttctcattttggcatcttatcccttccaatggaattaaaattctgaattcctttttttcttaataaaactattttttaaatcctattacaaatatatattcattgtagaaaacttgaaaacatttttaaaagaacaaggacaacaataaagaaaattcactacctacagttaatattggttgtttatattgttacaatgagattctccaattatttattggggtttttttcccccctacaaggaaggcagcgtaagcatttcctgttattatattttctttctttcttttttttttttttgacacaggttctcactctgtcacccaggctagagtgcagtggcatgatcatagttcactgcagccttgacttcctgggttcaagtgattctccaacctcagcctccccagtagctgggatcatgtgtgcacaccacaccacccagctaatttttttttttttttttttttgagatggagtctcactaactctgtcacctaggctgaagtgcagtggtgcaattctggctcactgcaagctctgcctttcaggttcaagcaattctcctgcctcagcctcccgagtagctgagattacaggtgtgtatcaccacacccatctaatttttgtgttttgttttagtggagatgaggtttcaccatgttggccaggctggtcttgaactgacctcaagtggtccacccacctcagccacccaaagtgctgggattacagacatgagccactgtgcccagctgtacccagctaatttttaaaaatttttttgtagagatggggtattgccatgttgctgaggctggtcttgaattcctgggctcaagcaatcctccggtctcaggctcccaaagtattgagattacagtcatgagccactgcacccagccttctccagtattttaacactgagtagaattctattgtgaatttatttaaagtattaaagtgatttgggattgtttttatcttttttagtcgatatgtttttcaataatgttttaacattctccaactattcttatttttttccaaaaaaaaaaaaaaagacagaaatgggccctggtggctggtataatcaaggtgcggttttgtcctttaacttctctgacagccttccctgtttatggatcctctgcctctgtgaaagcctcagactttgcccttaccatgtgtttcttagcccttgttttaaaaaacaggaaaaagaaagaaattgtcttctctttcaatataacaaacaccaggttgttatatagaagatacaattaacttcacattacctggtatgctatgataaactatcttccaaaacatatatttgtcttctagttttttgtcactgctttgtctgagtttttgccacctttgcagaaaacactgttagacgtgtaaatctgaaaaacaggaaggtctcatgacattagtctttcctgtcagctctcttttgaatctcctataactgttaacagtagcaaagaaagcaattttgatactttggaatggaagacatgaaatagctattctgaaaatagttgtgaacataccaagttcatagtgtttagttaaggaaaggccttgcttcataagaattagtgacttggttttttttttttctttctttttgtttgtttgtttgtttcgtttttttgtttgtttttttatcatgtaactttgtttcagatttttcaaggttgggagcagaaatcctcagtaatttattttacccagaatgttttaatctgaaattttttaaaaaacaaaaaaactagatatcttatgactgttgctctcacacaaaaataggtgttcagaaaagtaaatatattcttactcaaagaataaaaatgtcagctgttagcaaagtcatgaacccatgtgtcatgattcttgatttagagctcttaaatatactcaatatgaaccctgtcttagaaaaacaatttgaagaaatgtctggtggttttcccctgtttcattcctactgtgtcttgtggtttctcttgaggtcaagggtgagactaccgtgcatgtttcaaataaagaattgtttgtgtctgtgttctagatctatgtaaaaacctcacaggattgggggggatatgctcagaaagtttgttctttgtggcacattttttataatgaagttccatcttgagagtttaagggaccagtttcaccgggtagagaaccgcatctgcattgctagctaaactcactgttgtttcccagacagcaatcctgccttcctgtgccacttgcgccttctcctttttacacctttgaaagttcactttgttgcttgtttttcctcaccagttctgttcgtttctgtatgtccagacactaatgcccacctctggctattgttcttctgcagagggagaaccgaagattacaggaggccagcatgaggttggaacaagagaatgatgaccttgcccatgaactagtaacaagcaaaattgctctacggaatgacttggatcaggtaatccttagaaatgagactgtgatgacttcctcagggcaaagaccgatttgccctcatcaccgcccccacaaacttgctttgttcttgactttgttcttgaggaatggacaagtggcagggacagtctgttaattggagaccatggaaaacataagcctttgagaaaggtttgggtcatttctaaatagcatgtgtgacatactttctttatacctctaaactctgttatgtctttgttgatacctttcctgaaccaatggctgtcagcataattatctgagaacatcagtcaccaagaatatgcctgtactaatgccactctaacagtagatgccttactttttgttccagtaagaattattctccataataaatgtgaacttttacatgaagtacctacattaagagttggattgttagattgataggcatctgagtggctgagagccagactgcctgattgtgaatgctggcaccaccactgtgaaccatatgaccctggacagttcttaagctgtctataggtataaaaaggtgtctatctcatagagatgatataacaattaaataagtaaaacacttcgatagtatgtgttcattaaatgttagatgtagctgagagagctggcactaaagggaattcaaaaacaaaaacaaaaactgtgttgtttgggacacaggatatggaaggtagaaaaagctgcccagagaatggttttttaaaaagttgtggccctgttaaccacaaacctcattcagcccacccatttggaagctgtgagaagtggtatgagaaatatgtgactaggagagtcagaaccaaagaaggtagccggatctccattcaatcagggtcaattcagccttacctcagtggtcatatttttgtattcatgagactgttgagataagtcagtgctataatgaaagtcttggttctatgttaactttccaaatggtcttgattcacacttgattctgccattttgaatcttttatccattaataattttcttatgatggctgactaaatgaaacaatttttaaacagttggattcagtggggatgcagtgaaatgagctaaggagagtttcaaagttgtttggcaaatgtagttggtaatatgtgttaagacgttaaaaggtttaagcaataataaaattaaattttactatgtacccactatgtgccaagcactaaataaagcaatttataaacatcatctcatttaatctccctaatgactccaggaagcagttattattttaatcctccatttcatgaatgaggaaactatatagatgaggaaactagagatcctctgacttgtaaagctatcctaaaaaaaaaagatctgtttaaaaaaaatgtatatacaaggttgtttactgcagtgttacttataagaatgaaaaatagaaatattattttatctatgttcactagtaggggagaatgacagtttgactgtaaaatgtctttctggaataatttttgttaatgggaaaataatgataaagtatttttttaaaaaatacttttttttttctgtaaacagtaaacatttataatgtttgcatctaaatttcaagggctactggctggcattgggtcatcctatagggaaggggaccatagtatacctagatagggaagaagcccacaaggaaatacatcaaaatgttactgctaggtatctctgggtgataagattaaatataatttttatattcatctttatagttttttcccatttagaatttatagaaagaccctaaattacttaaccaccataggttaactaaaaatgagcattggaacttttaaaaatcagaaaaataatgaacattataatatgcatattatatatgaatataatactaaataatatatataactttaataatcagaaaaaaattattatcttaaaaatcatttcttcaccaagagaaccctttatgtgagtcagtctggagtgactgccattataggtattcctgaagtaattgattattgagtaccagggtagctcatgatgtgagtgctagaacagcccctgaagaaaaggttccatcagaccttcattcttcctctgccttctctcttccctccttgactctctttccctctcttttaagaaaagtaaatatgacctggaccctccctttgggagctttttatctagatgaaagaatctagatgaaagaataaaaactgctgtttcatgcatatttcctcctaacttctgattttgcagtttcctcctcattggggtttatttgcttaccaaaaagctgtccctgcagttgaagtgacctgccccaccagtcttctaggaagggccctagcctgagagtgaaaagtactggctttgcaggccttcacctagtttgcccagtactttcccattcccagttcatgaaaatcagatctcttaattaaaatagcaaaacactggcaaactttaaacaaatataaaagtagattgtatttaagacaatatgtaagcaaacaaacactaattaggaaattaggttctttgcaaaaataaatcatttcttactctgaccattttagtgctaatttcaggcttcctgggcaccaaaggctcttcagcttttccctctggcagagccttcctctcttgagaactcgccctctctcggattccttaaataaagatttctcagtgattagaagtgaaaaaaaggtgcaacatctccatttcagtttctgtttgctatctgctttcaggcctttcctgtccttccctatttgcaaggaacaaaagagaagagacatgattagtactgtcctgctgaggaccaggggtctaggttccctctcaccatagcaagttctgttagaccagaagctacatggactaagtggaaaattattttgttttattttaagttgaacaactggcctggttagttctttcagaaatcatttatcagagatcctcatttctgatattagggctgagtcttttctgaggttattggttgattcatgattaaatcacacattgcaatgcttgtttctctcatacatatatagcagaagccttagattgcaattagaactttcagtatcaatgagacattataagatattgttaagtatttagacttgataatgacagtgtttcaatcttatcaaattatggtgaaggctgtctggtgcagtggctcacgcctgtaatcctagcactttgggaggccgaggcaggtggattgcctgagcttaggagttcgagaccagcctggggaacacggtgaaaccgagtctctattaaaaatacaaaaaattagccaggtgtggcggcatgcgcccgtaatcccagctactagggaggctgagacaggagaatctcttgaacctgggaggtggaggttgcagtgagccaagatcgcaccattgtactccagcctgggtgacagagcgagactctgtctcaaaaaaaaaaaaaaaaaaaaaaaaattatggtgaaggctttataatttgggctcaaaggtagaatttgaaaggctttataatttgggctcaaaggtagaatttgtgtttagcatttcattcattaacattaaaattaattcctacttaagtgaggtatagtggttggctgtacaaaaattcaaaagaccactgttagagggatactcaagttatttcagatctggccctactttgatgaacagaacaattgctcctacttttctgtttaacataagaggagaaactgtgaattaagcttcctggaaaactggactcttccctataggacccacaacaattgctgcagatgttgtatatggtaacagtagaaataagtgaagttgccttaatcttgacctaatgaagactgttcagcagaaaatgtgcaaataaaaataataggtcttcttagcataaacatttaggtgtttttgaaaaaaattcctcggggaagtgtttttcccccttttcttttctttttctttcatttcttttttttttttttttctttgagacagtctagccctgtagtccaggctggagtgcaatagtgcgatcttggctcactgcaacctctatctcctggtttcgagcaattctcctgcctctgtctcctgagtagctggaattacaggtgcccaaaaccatgcctggctgatttttgtatttttaatagagacggggtttcaccatgttggccaggctgatcccgaactcctggcttcaggtgacccacccacctcagcctcccaaagtgctgggattacaggcgtgagccaccgcgcctggccagcatttactttaaaacattttcataaaatgttaaaattttagatggctctccaagagaccaaactgaaaaaaaaacatttatttcagtatcatgatgaacattatgaaaggatcagtctgttcacaaagtggaaattgctgtgggtcctgtaagaggaaggcttagttgcagtcttctttattagcagggctcaaacattctggggtagaacttgaaccagtgggctgcagttacagggagagagttggttcagtttttaagaacactgaaatgagcagtacaattgttttttgtttttttttttttttttttttttttttgagacggagtctcgctctgtcgcccaggctggaatgcagtggcaagatctcggctcactgcaagctccgcctcctggtttcacgccattctcctgcctcagcctcctgagtagctgggactacaggcacctgccaccatgcccggctaattttttttgtatttttagtagagacagggtttcaccgtgttagccaggatggcctcgatctcctgacctcgtgatcagcctgcctcggcctcccagggtgctgggattacagatgtgagccaccgcacccggctgtacagctgctctcaaagtgccactctgtgcctatctgtcagagactttggggagggtctccctgctttgtgagtaacctcagtcagtcatctggcttggggctctagaatggaagctttgtgcttccatggtttatttatttttctctttttgttttcttttaaaatgccgtactttatgccacatcctttcatgatgtacatcaggtgacttacaacttatgaaaacttgacttgcagtgttcatattgcattctcaaggtctacctctcattttagttgttaatttgctgttagattttcccccctaaaatctaatgcatcagagcaatttttagagtcttaaagacttttaagggactttttcgccttaactacccaacggtttcaaatgatctgcaaacaaagctctaaccactgggctatgagccatcaggagccagaagacagggcaagcagagcagctggaatgcagtttctctacagtcaccagcagactgtgctggcctggccatctggacatgcaggagatatggcagaaaacagacagaaggccgcttggccagtcctcagcagactgggctggcctggcccatctggacatgtgggagatatggcagaagacggacagaaggccacctggccagttttcaccattatttggataacattttgctgctgtcagccagggatagcttcttcacataatcacctctcctctgtgtctgggttctctctgctgaactcatcctgtggccttctgccatctccactgcatgcagtctgcatctgcaatgatttagccacacctcttcattcaccaagtacttagggagcacctattctgtacttggcattgggcttggtgcttgggatagagtgatgagcaaaagagatatagttcttgtctcctggagcttaaagcctagtgggcaagacaaataaatcccatgtgtaagttgtcattacagtcctattaagggaaatatgagagatttagataggggagctaacttagatgagggtgagtgggccagggctgagggcatgcttcattgccatgtgaacttgaagccgaggcctaaaaggtgagagcctgacgtgttaaatagacatcatcattctagaaatatgatcttttcttcctgggttcctggtccatatttccattttcttcatggctctctctatcatgggtttttggtcttgatttctccttactagactcactgccctgtgtgagtggccatgtgggcaggtttacctcagctagtctttgaatttgccacctaactgttgtcctcagaccaccctgtctgctcccctctctgagtcaacccccattctccaccagttggaagtttctgtgtgaggctctaccccttcatcagatccatctacacagagtgagtgctgctgtaacatctaaaaatctgtaagaagcatttagaaggaggatggactttgatgttattcaaatctgaattcagatcatgactctattagatgtgtgaccccagacagtttgttggatctttccaaacctcactgtcataatctgtaaaattattgttggtgtgtggattagaaataatgtgtgccaactagatggcacatagttggcattcagtgaaagcagccatcgcttggttgagctaggagggaaaataatgacttgcaataattttggaacagcaactgaagattgggtttggagaagatttccacacactttctttaccctctgtatgactgtgatgtatgactgtgatgcaccatgatttgcaggcagaagacaaggcagatgtgttgaataaagagctccttttgaccaaacagaggctggtggagactgaagaggagaagaggaagcaagaggaagagactgcccaggtaaaaggaataatatgtaggcttttctttacaaaggtatgttggtagggaattaacactataaaaaagaaggaaaattaaatttcttctaaatcaaaggtgatgttaaagcagtaatgtaagtagttgagtgtacttactcaacatttttgttcaacatttctgacattttttttttgaagggtgttaaaagaggaggcagtatttctacccttgaacagcttttaggaatttgcctttactgagatatttagcaagagtgttgagttttctctaagtttagtaacttggaattatgatccaagagctttgacaaatctgcaaattttgtgttgtatctccaagataattgacttctctgaagtagtttatgagcattgttaaaccgaaagcctacagagatctctgctgggagttgccacacagcccctgccgcaatcagtcacacttcattttcctgattcacaccttaagcagcatcagtattcctggctaagctttcaaacctatttcctgggggaatataaagaaacattttgggaaccagccttgaagttagcaccctacactcttcatgggagctgtaaggctaattagccagaaaatgccaccagtgcaaagcagtataggataggggcagagaggcctatgggcccaaggaattggagctttccgcttccccaaggaagaacatgctgcttcatcagtgttttctacccctgtcagtcccagccaggggcctgacacagattagattatgagtcagagtttcatcacaaacaattgaagtcttctgccaagagtgtgtttgaattttactaatgtagctaacttataaagtgaggaagcatctcaaatcgtgattagcttattttaatgagtttcattctgagacatcagtaatactaaacttaaagcacagcataaagcatttcaaggatctacatccaagcaaccagaaaaaaagttccactaaagttacatgtggaggaatgtgtcatttagcaccttccagactttataaaaagtgttccatggtttctttttccttggaatctgatttaatgagtctttggcatttacagcggcccaggatatatatttcttacctactcaaaaattttcaggggctgattacccagttttagattatttaggctccttaatgggttttgttttttctttacttcctgccatctttgggccacttaagctactctagatgaggcataaggctcttggcaagtaaatttaacccaggttctacctgctccgtggttccatagacatatatactagcctgtaagcaattgatacctaaaatgggaaggaatatgacacttgaatactcacctagtatgttgcaagaacaatgcaagatgctttgcacccttcctcccctccatgtgcatctgtgtgtgtgtaactgttttaatcattatggtacccttgtaaaatagggattattctcattttcagatgaggaaactatggcttagataaatttagtgacccttgctcaaagactctcagccagccaagtctgtcctaacatctatggggccttatcgtggaaggcgagaaggttattgtttatgtccttaaattatgtcagatagagaataaagatcaatataaacaactgagtgtagatcactataacttaccaattgcttttagaattttagaatctaacagatatgaagaaattcagaaatctaatgagtgctattataaattgcaataatttatgaactagcaattacagagtatacgccattaataatttgggatgctttagtgcagaacgcatctctttattctgattatgtacttaaagtttaagcagagttgttttttgtttgtttcattacttgtttgttcaacaacttgcagaatttaattctttcctttgtatctggtagcacctgagcttttccatcaccttaattttcccctatacctagaattctagagctgctgggccacaaaaataactgtggttataactatagcattcataatttaacatttcagtgactgtaacaggtacctgccattatgtgtcactttagctccttctaaagtcagtttctttagtccctgaatctcctgtccttctcaaaactcttatcttcccccgtcttttctaactctagtccccaaagcctcttgtttctgcctccagagaggtaacagcagtaaaggtagactataaataaggaggcctacaatgatttttttcagtaatttataacatcaagagtaacaaatttagcatgcagtattgccttgatgttttgttttagactcttataaggataaagatagcttctgaatggatacttatttagcaatatgtttagaagtagcaagcataagcaattttataatggtgttgttcatatgtctcatattttacagaaaagaaagtaaggtttctgcatctctggagatgattgactttttcagattatcaagatgcagcttccatgaagataatttatatagttaacattgttaccattgttactgactatgaatcagacagacttgaatatagatgtttgtgaaaatttaagattttggctaaatcctgatatttctcattctattctttctagctaaaagaagtcttcaggaaacagctagagaaggcagaatatgaaataaagaagactacagctatcattgctgagtataaacaggtaatgtacttctgtggcacatagagctagttatagtttgctgctataaaagtaatttttttttttttgcttgaggccaggagtttgagactagcctgagcaacatagcaggaccccatatctacaaggaaaaaaaattttttagttagccaggcacagtggcatgtgccggtagtcccagctacccgggaggctgaggcaggaggatcagttgtacccaggagtttgaggctgcagtgaactatgattgcaccactgtactccagcctgggcaacagagcaagaccctgtctctaaaaaaataaaaataaaaaagtaattattttgttgttgtttttctttgggggaagaaatatttttgtttttaaagtttccagaatagttttccagatttattaaatttggtgactcactgtctcctttgaagcagacactggttggacatacttataacttattacttatagcttattacttataactgataacttgggaggtctaactgaccaaaacaatctattggttgtttacagtgttgggtagatttagaggaatagaaaaaccttttgatgactactgagatcctgtttctgccttagtcagaagctaatttccagtagatcacacttggaacatttgcctctttgtgaagtttagttattgtattaaatggcagtagctaggggatcagtgtgccctttgctaccatggtacagaatgtggtaggcactctttttcctacatggctatgtggccttcccctctgcaggccaatgctagcaggaagctttctattgtgaaccttaaaatgcttttaacaaagggctcatcttcttgaggatgtttctggccccatcaccatagtggtctcagaaagccctctttcctggtatctactggtatcttcctgtccttcctgttggctggacatggcaaggactcctctcattgctgagaccctgagttatctgttcaaattccaggtttctagaattaattaaagtaccatatgccatcttttgatctaaagatttccctggggtcttctacttcacataggactctgaagtctgatacttactttttaaaaaaatgtgtttttttgcttataaattaaatttgtgttcttgtggaaaattagaatagtgcagagaagcacaaagaaaacaaatctccctcagtctttctagctaatcattgtaatatattgaatatgcattgttgctatacaaatgctttataaataaatttaaaatatatataaacaggatgaattgtattgtttatcctttttttttgtaactagctttagttcactaatacattatgaacatctttccataaggaatccgcatattcacggacgattgataaataaaactttagagctattttactcttctatgataatcaacatatgtttatttaatgcctgctctctgtgaggcttaatactttgacagacaaaaagatgaatgaattcaagttttcttctctagaagcttatcatataatgtggaggtaatacctacgtagaaataagaggaaaggaaacttattacatgtgggaaatgaaaccttttgagctgtgcttcaaaggcgatgtaagacttggatctgtagagataaagaagataaagaagaggatggaaatggtagaaaagagagaacaggatgtgcaaaggcatggaagtagattagtgaagagaaaaataattcatttggtaagagattccggtacaaaagagaagcaaagggacgttagggtccagatcaaggaaagtcttcagggctaggcttgggaccttggattttattttgtttgtggtaggatctttttgagcaggaaagtggcataatcaaagacatattattggcactaatctgtcccagtaagaaatgtggaaccaaggagacagaccgcgaataccagagtccaactgtaagaagaaccaggtccctgaactaaataactaacgaaaatagagaaaagggagacacaaaagacagttttttttgttttttttttttgctagatgagaaaaccttgaaggtgatctgagatgccgaatgtgggcatctaggagaagaggtggtagacattaaccaatacaaggaacattaaagactatgtgctgtggaatttcccattgctacaaatgcatgtttttcattgccagattatgccatgggtggccaccaaatgcagcactcttcaaatagtaatcctggggactattcttgaatattatctggcaagcccttgaaataatgcaaaaggcaacagacccatctgtttgaagataaggatataagacacaatctaaatgcattctatagttggaattggctattactggctctatgcataatgttttggcttatttaaaagggtttaaggtttgcagaatctaccatggtgatctcttctttttaacatcagtcaataccgtcctactaatggttcctcaggcttggatctggagaaattggaatgaaactcaacaaactaaactcagcaagcaagccctcatcaccagagctatttttgagtagactgggtgggattttttaaatgtctgttttgataatagaggtagaccatatatgtttttatccaaaattatactttaaaatttcacatcccctgtttttccatctttttttttttttttttttttttttttttttgtgaggcaaggtcttgctctgtcacccaggctggaatgcagtggtctgaacacagctcactgcagccttgacctcctgggctcaagcgatcctcccacctttcatccacttttctaaaataaaagattcttatttcagacaatggatttgaacatccaatacttatttatctagattttttcctttgaaagcacctatttctaccatttctaatacttgttagcaccttatttcagaatcaataagaagaatatattttatttaatgtacacttactattggccaagtgctatgctaacccctttgcatacttttttttccacttgattgctatagcacagcacttttcaatcatgaggaaactgagtcttagaaagattaatgactttgcccaagctcacaaagctataaagaaatggagctggcctgccttaaactcacatttaactccagcagctaagtttttaatttctatgctatgttgccaaacctacttaataagagttttagtctgtattattttctggtcattttaactttgttttatccactctgccacctttttttaataccttaaattctggggtacacatgcagaacatgcagttttgttacataggtatacacgtgccgtggtggtttgctgaacccatcaacccgtcacctacattaggtatttctcctaatgttatgcctcccctagtcccctacccctccaccaggccgcggtgtgtgatgttcccctccctatgaccatgtgttctcattgttcaattcccacttatgagtgagaacatcactctgccacttcttaaggaaacttttgtgattgaaaacaggttctttctgtgacagtagaaaggagatatttctgtctagaattcttttcatcaagattttctcagcatactaacttgtacaaagtgaatactcagcaaagattctataggttaattccaaaagtgaggccaggaattcacttgaaccagtcacagaaggctagtgacagaaagaaaccaaatctactctccgtatgtttctactaattaaggtagagtgtgctttacatatggaacgctccagctttctgctgctcatttccgaaatgactggcatttgcagtgctattcatttgtaaaattccttctaggatcagatgtgctagcataacacatgaattgataagtagttatgtgtacatgctgcaagagttgttctgttttctagtaaaagactcttttctcatccttagatctgttcgcagttgagtaccaggctggagaaacagcaagcagccagcaaggaggagctggaagtggtaaaggtaaggagtgaaatcgtgctgtgataaaatttatttcaaagtcacacaggcttgtaagtacctgaaagaaccccaaacaccaccattttgtattaaaggatttattaataggaattatggagactaggatacctctcttctgaccaggtgtgattgtcttccctaccaggtgaaaggttatgatgctcccataaatcatatggactgtcagaggcagctaacatgaaaggaagtaggatttgacattgtcacaagaagccccagagcttgagatgagagtggtatgaacctgagaaccctcagcagcccacatctgactgagcctgcattgatgtggcttcagtatgggactcagtaggatcatcccatcactctctttataagtaaacaccatgggcaatatagaacttagctggaaaaacatgtgttgggtaactgattcttgcactaagtttttagaggtttatttttaaagaaaacctgtggcatttgtttacttgctgccccctggtggtaaaatgcattatgttgatgctctatttgaaaaaaacagattgcttattccatagaaacaacagtaaaccaatggattggtattcttaagaggcaatattgtcatagtcaacttttgggaccagtgttacagaaacctgacatcatcttatttgaatatgttcaggtttcatactagtaaataaatgtgtagtaagtaatttagcaatcttgaaaagtgatttaacctttttaagcttcattttgtgttctataaaatggagataacattacctgcctcaaaaaatcattctgaatgttaaataagataatgaatataaagtacatagtgtatataaagtgcttatattagtacctgacatacaagaccttgtattccaaaagtattttcttcttactcatgttacaaaatgtcaatgagagatttagtgagtataaggtttggtgttctccctctctgatgtgctaaaatttgatgtttgtatcttccctttctggtctacttttgcacttctttctagttagcacttaccactctttgtacattataggcatactgaccaagattcagttgatgaagttgaatggcataaaggggttaactctcctgaagtgaattttttttgtatttcttctaacaaaaaaaaaaaaaaaaaaaaagggatacatgtgcagaaggtgcaggtttgttacataggtatacgtgtgccatggtggtttgctgtgcctgttaacccatcctctaagttccctcccctcagtccccacccccaacaacaggccctggtgagtgttgttcccctcttctgtgtccatgtgttctcagtgctaaactgaaatctttatggaaataacaaaatgagaatttatattgattattcagcaaaggttttattgagcatatactatgtgcatagctattagactgccattttgttatagaaattacacatgaaaaggagcttaaaattttcctgtaggacaagttatgtatacatgcaaattaagaacttcggaagcagttcaagggagctaagttgggccaggtgtggtggctcacgcctgtaatcccaacactttgggaggctgaggtgggcagatcacctgaggtcaggcgttcaagaccagcctggccatcatggtgaaaccctgtctctgctaaaaataacaaaaattagccaggcatagtggctcacacctgtaatctcagctactctggaggctgaggcacaagaatcacttgaacccaggaggcagaggttgcagtgagccgacattgtgccactgtactccagcctgagcagcagagtgagattccatctcaaaaaaacaaaaaacaaacaaaaaaagtgctaagttggatcacaatgacaatcagcattgtagagaaaacaaaatcatgagaactatagaccaaaaaaggctttatggagattggactaaagcagggtggatagaaattagttagagagaagtgtttaaacagaacattatagaagaaatgatgtgagtgaagacgcaaacacaggaatgagtatttcagtgtctcattacagagactgatgtgattagaatatgtattaaggaacagaggaaaatattggctaagtaggtgagactacctaatgaaaggccatgacattcaggaagaggaatgtaaacttgtcttagccagaataaagaagaacaactaggctcacgcctgtcattccaacactttggggaggctgaggtgggcggatcacttgagtccaggagttcaacttggtgaaactcctggactgggaaacttggtgaaaccctgtctctacaaaaaatacaaaaattagccggatgtggtggcatgcacctgtagtcccagctcctcaggaggctgaagtgggaggatcgcttgagcccaggaggctgaagctgcagtgaactgtgagcatgccatggcactccagcctgggtgacagtaagagcctggtacaaaattaaaaaagaaaaagacagtaaagcttcttttttattgatgataaggtcgcaaacaggtaattcatttgatcaaggttacacagctagtagaaccaggatttaagcctggaagtcagactctaaagtcaataacattagctgttagactatactacctcccctttctctagtgcttcctcctatctcatttggtatgataaatagcttttggttttttcagtttcctgtaataaccttcttttgtcatgatcaccccccagttcatcctttacactataatcagaatgagtgttcccaaatataaagtgatatttgactatcactctgtgtatcaatgcagaattagattggccacatatagggaacccaaaatagcattggcttaaacataaaaggtgttgattattttacataaaagcagcctaggactagaaaggtatatctttggtgtcattagtaacccaagctaatcagtcattagtgacctacatcgtcatgtggacttctatcctcaaggtcacctaaaaaccaatccttcctttctttttttcttttttttttgagacggggtctcgccctgtcgcccaggctggagtgcaatggcacaatcttggctcactgcaacttctgcctcccaaattcaagctattctcctgcctcagcctcccaagtacatgggattacagtcacgcgcctccacacccggctaatttttgtatttttagtagaaaaatacaaaatacatggtttcaccatgttggccaggctggtctcgaactcctgacctcatgttctacccacctcggcctcccaaagtgctgggattaacgggcatgagccgccgtgcccagcacaaaaccaatcctttcaactagagctcccaccatcacacccatactctatggcagaattttagtccaaaaggagatgcaggatataaaggcctcattctcctgggtgagctctttctaagcagcctttttagaagctcccctctaaacttctgcttacatagcagctttgagggaatttagggagtgtcaccttttatctagacacactgccagctgaaataaactcagggtctgttagtaaggaagaaggagaaatggatattgggtgagaatcagcagtatccaccacattttagcaggtctgccagactgcagctctgtcaaacttattgctctatctttgacatgtagcacgaggctcggtagagtaaatgaatacattttctgtaggataaaatcagaattcagcaacatggtatttaaggacctttatgacctggccacagggatctctcatctcgctcattgttgaatcgctttctgcttaagccattttaaattctttgaagttatctgaaggtgctatgtctttgcacatggtggtgttctctttgctgaaatgtcatcctccctcttaagtgatcaatctatttcttcaggtggttcaacctaataaaattacttagccagcttggtaaacttttaatcatttaagactcagatcaaaactatttctttaacatttttagtcaacagtaaatacacaacaaatatttacaatatgcctatactgggctaattattctcagaggttcttaagagagtgacaagttttgtttttacatgtctaattaatattaatgaaaaggaatacgaagagtggtttatggatgggatgagaaggaagccagtgagtactgagaaggtgacccctagggatttggcctggaatggcaagagctcagacatgtcagaggaagaaatttttttttttttgagacggagtcttgctctgtcgccaggctggagtgcagtggcgcgatctcggcacactgcaagctccgcctcccgggttcacgccattcttctgcctcagccgcctgagtagctgggactataggtgcccgccaccatgcccagctaatttttgtatttttactagagacggggtttcaccatgttggccaggatggtctcgctctcttgacctcgtgatccacccaccttagcctcccaaagttgtggtattacaggcatgagccactgcacctggcccaagaggaagaaattaatggtcagctggacatgggatgaaagaggagctaatgaaaagatgatccaaagtcgtcaggcccaaatggtggagacatgcccagtggcacaaaagtgtggtggagagttgctttttgtgtgtgtgaagagaggaggatgggcacggtgatggacacattgagcttgtagcagtagggcatcaaagtagaaatagcatgtaatatcttttatctctattgaattatttttgaaaataagtaaacaacagtactattgtctggaaaacagttgctgttgtttagtgctgtgtgcccgattggcaatgcgggcatgtggtagagttattttattttatttttattttttgagatggagtctcattctctcgcccaggctggagtgcagtggcgcgatctcggctcactgcaagctccgcctcccgggttcaagcgattctcctgcctcagcctcccgagtagctgggactataggcgtgtgccaccatgcctggctaattttttgtatttttagtagagacgaggtttcaccgtgttagccaggctggtctcaatctcctgaccttgtgatctgcctgccttggactcccaaagtgctgggattacaggcgtgagccaccaggcccggccggagttacttttattaagcaacaggggtcctctttgcttaaaattcaacaacaggacatgtgctttgttgcaagggtagatttaggttagtcatgatgaccttcctcagtctactacaggcaagttctttaaactctgagtttctttatgaaatgaggatgatgatagtgcttacttatacagttgctctaggattaagtgaaatactacaagtaaagcatttggtgtggggcttggcatctagtaagaataatgatagcataaaatttctagaacagatttcaaagagatgctacaataccttctatttctagggtatttctagagatacttcaggaaaaaggagcacccgtcttggatagttgggttcgggctaatgattttgattgcagcacaagaaaaataattaaccttcagaaatgggcctgcatctatgacaataagcagcatctaaaaaagtcataaattgtttcagaaggtgatttagcctatggaatagtttgatgttggttatctcttttggatactttagggtaagatgatggcatgcaaacactgcagtgacattttcagcaaggagggtgctttgaaactagcagccacaggcagagaggaccagggaattgaaacagatgatgagaaggactcacttaagaagcagctgagagagatggaactggaactggcacaaaccaaactgcagttggtggaggccaagtgtaaaattcaggttggtgatttgataaaagaacaagaagaaagaataaacaattaatggtccaggatactctagtacttcagaatacacctatctaggtcagaattgtatgatgaatacattttctgtctgctaatgtgtcctgcataatcacattttatatcatgtattcttaacgctgatataaacaaatatataattttaaatgaaattttaataattaaaattatatcttatgggaatttaattaagcatatgcttgttttttttaccctgagattttttgcttacatcctttctcacagaatgtggtcacttcagtggctgatcctgaaaatgaaaaaccaaaccccctctgctgtgtctaccctgagagtcacacattggctgacacccgttctttcctttagagcttctttttatctttagctcattttgtcaaacctctttccccattatctttctccatattggcgcataatataattagaaatagtcctggcttctgatggactcttcttcatttcattttcccagtgatccctaccagcaccatggctgccatgtcaccagcctccaccacaccagccagcttccaccatgtgtctgctctgaccttggacattcttagggcaaagcctatttctttggaactggaattcattcatgcttctactatcagtaaaaattcatccatatgtttacatttatttgtggtttttaaacctgttatatcggattgcaacctaaacctaaatttggacctaacttgcagggaaaaaaagaataaaatgagcttttctttcactgtttaaagaaagcacagattctagatttttgataagtcttttagctcttaactttatccttgtactaagaagccaattcaatctctcctgggttttgtgggaggaaaattggcagcacataccttgagactccaaaaagctgcacacttttatttatttattggcaaagagaaaacatttatttaactcagatgattttcttgctttaattaggaacttgaacatcagagaggagcccttatgaatgaaatccaagctgcgaaaaactcttggtttagcaaaaccctgaactctatcaaaacggccacgggcacccagccattgcagccagcaccggtcacccagccacccaaggagagcacatagttccagccttacccaagcacaagagcacaatgttcaaaccaatggaaatctgggaggattcttcctggtgtccctttgaaggaaagtcaaggaggccagaaaacaagccagaatttttcagtagctctcactctttcttgtatgacacttttcaaagggatgctatttaaactgacctgttctatgttgaatacctattttccagcttctggaaggccatgttcagatccatcatagtattacacattattttgtttgcctgatgtttagttggaaataagtaattcagaactaaatgcttttttatttagaattattcataattatttttatcttacataaaaatggagacatctgttattccaaggttgaagtgataagaagatctttgtcacaggaaaaaaaaaattgaaacctaaacatcttaagttttcaggatttattcagataaagcacactgtggggccaggcatgaccactctcaggtttcctcctgagcctgattcccagggaagtgttaatcctgtccaaaggaaagaaccaatcagcgatcattggtttactttcattttctgttcggtacatctggaaatgaagtgccaggaatagacgggctgttcagattatacgctaggtaaaaggaactgaaattttaataagtgtaggtcaggatcatttgggctgtggtattctaacagatccttttaagaatgccacataggacttgtgagttcctaagtacaccaaagtatggacacagatgtgacttctggcaattataaagttaaaggtggatattgcaccttacagacttagggagcctttaccagagacgcctaaaaagccccaggttcagccattgtgctgaatagagtggaatatagaaccagggacagagtatttcatttaacgttgatatatacttgctaaggaaacactaacaatactgtaactttgttaaaggacatagtattgaaatgggaaatagaggtcaggctcacatcatcttagtttaatgctgggcaactttttctgatttctgtagttccctgaaaatgtgtccttcgtacccataaagagatacaaatgcatttgtaacatttttgattgaatataaaacctttacagaaatacttatctcatggaaaggtaaagctattgtttaaaaattagtggaaatattttttcaattatatttaacatgcctataaaaatagtccttgcaggaaattatttgataagagcaaaactatttttattttataaactattttggaggcctctgatcctttcaaaccaaccaaactactattagatatgtacaataacatttgttgatattaatcattggcctcattgttgaacatattatttgcaaagaatcttaaactctgtagtgccagaatgattctcatctgtgccatattttgcaattaaaagtaacacacccttagaagaatcaaataagagccatctacatcccaggaggatgcaccaagttgctcacagtggatcttttcctctaaaatgatcttttatgttctaaaaagtgaaatcccctttatctgtgtttatattctctacagcccataaaactgatgtgattgttatgttatactcatcagataatacttttcttacataaatctttcattgttgttctgacatctttcattacaaaatttattttcttaacaaaaaggaacataacccagcattccaagtgtctgtgttggctttaacattctctacatggtggtctagataagctaatttttttttttttttttttgtaaaatgtaatagctagaaaatgttatcttggcgcttgtttttgtaaatcatttagtataggctgttagctttactggtactttacgctttgattccaagaagccttgtgcagttgccttatcaaatggccagctaaattaaagatgctcttttgtgttgtgaatttcatagttctgtacagagcttgtttcaatttacaaaaataagtacattccacagaatgcctaaagtgtgtaattttctttaaataatagtaggtgagggagaaacataatggctctaggtcaatcccttatctaaagaccttgttcaacttcatagtccctttccttttaaagaggagaagagaaaaatcccccctggccaggcatggtggctcacatctgtaatcccagcactttgggaggctgaggtgggtggatcacctaaggtcaggagtttgagaccagcctggccaacatggtgaaaccctatctctactgcaaaatacaaaaattagccgggcttggtggcgggtgcctgtaatcccagctactcgggaggttgaggcaggagaatcacttgaacccaggaggcagaggttgcagtgggccaagattacggcattacattccatccagcctgggcgacaagagcaaaattccgtctcgaaaaatcaccaggtacatacctctcaagtttgataagtccatcttttgagttttcttttagctctttcaaaagattacgagggcaatacatattttttttttttttattctccagccccatatcatacttgggtatgcctgttggtaccataagcctaaactctccttcactgcaatgcctttgagtcagtagcaatagtaaagactagaaacaaagaaaattcagaatttggtatgtgatatgattgttcatacaatatgttataatagcaatattccaaacaatatgtccttcactgtctattgttggaaaactcatgcatcccagcatgaagtaactcctagttttaattttagttattttgagatatatttgagaattgcatctcttctcttgaatttcacttagaagagattaaccagccaaatatccaggaaagtttcaaaacattctagtgtttttcatcctttgctaggatgcactctgtacaaaacattcctctgaaaatctaatatttgcagtatctaagaattgatcatttctattttcattaaattctgtggaaaaaattaaatgaatgaaattcaacttcataattcagttcatcagcttttgtatcttgagaatctaaacacgtctttaaatctgaaagaaaccaagctggattttgcagtgcatatgtttgctagcttcccacatcctgaaccatgtcaaaatttggttttatttagttacatataatttaatgcaaagaaattctgttacttaatgttctgtttatttatgagtgcctatcaggaacactaataggaatgccattcaaccagtgtcttctgcccctctcccagctgttaaattagtacttcttcattggctttctgaaatgtcctgagtaaagtagaaaagcaacctttgtatggatgtggggatatttaatagtatgtatcttgtttcatttttttcctatgatgtattaatatttatttttctccaacccctgctccattttcttaaaatattttccagttaataactagttgctttatttcctagctgaagtgagaaaaccaacggaaaacaatacagatttgggcagaggagatagagttacatctttaaaggagtgagccagtcacccaggagaatcacatgtgtaactgatgtaggggtttaagtcttcatactttcactaaaatctgtctactaactctcccaccaacctttgcatcaaacacttaggtacctgcctgattaggggggcccctttaagggaaaaaacttttaaaaaattaaatgccttggttttgttttatcttctgggaaagaacacttttacttgattagcaagatgattatattatataacttgcccttaaaaacactccaaaatactgactccttttctccaattacaaatgagtgtgaagaaattctgttgtatgatttgaacactattaggtttgtatgtgtgtttaattggaagaattttatatagagtatctctgctgcttttgtttacctgggtaccacacaaccaaatacacattgagatttcaagaaatgatgatgaaagccagaaggccagaccacagctctgcagcctgtttcctacaaccagatataaaactctttctcgtcgccatgctgatagtcacactgaactagaactgtcccaacacattcttcctctctcataatggcttccatttaatacaggcaaagccctttaccttagcaaattctttatctttcaaaagtgaccaaaatgaggacttcaaccttggctgcacctcaataggagatgctgatcttgagttgtaatgagaaaagtgggcatataggagattttagtgactgcagtcagctgtctggcattcctttctcagtttgcatctaaaagactacatatgtcaagcttatctccacctgaatttgctgcctgctataaaaacatttcattaatatatcccattcttcctacctccatctctggtttgtcattagtggtattctgaaaagcttaagaaaaaagaatcattgagtagaaagtgaacattttaagttattttcctttttcattggcaattagttaacatgtaaaatcttttccattaaactgtataacttttaataactatatattatatatgggataaaatatatggactgaattgtgagaatataaatgcatcgaaagactctggtgtcatgaaagcacaagaataaggctggagatggtcccagatccaagatgtcccaaaagccttttgtatcagtttctctatttttggtattttgcataatgcatggatccttagttcaaatgagggacaaagtttctcagtcagccccacttcctttctttctaactcctacctttcccttgcagaggaggtagtagagattctggaattgtctatttttatgaattccattattttgtccatggcatctctaatgaaaacaggttctagaataaaggagttgattagtctgaacagtactaattaactacaaaataaacgttagtgatcagcctcttcctctataaacaatgaccaattagacgtttccgtaattccatgtattatgtatagtacactctataaatgtaaatgtaatgcttgtctaaaaagtgcaatttattgtacattgtcccaacaaatgtttacttttataatcgttatgaacttgaattggattagtatcttgtttttatgtgtgaatgaagccttgtgaaataaacaaatgcaactgagaaggtaacaaggtgactgtttttgtgagccagtgatgttttcaatgctttgtgttgcccctttggccccattaagcagtaataaacatttgttctgaagtccatgtatgtcttttttatttttttagttgactttattctgactcatttgaacccaatgtttatgtaacacttcttacacctgaccccagactccagtcaacgtagaaaacacacagtatataccctgcaaaatgataccctgtgcagcaccaccacaaagtgcttcattttcctctctactgaggttccttgattccacgtaacagaaacccttgcaagctagcttaataatagtaattttaagaggcaattaattaaaaggaaataggatatctgtatcataggtcccaaaggccaaacacttgggcctgaactggcactaggacaaggggctggaatgccatcaggactctgaaagcaactgttcccaaaattgtgcttctgcttgtccttccagatgacttacctgcttcattcttctctctgaaaacaggctttctctgcttctaagtacacagctaccaagtttacatatcctctcttcaaactaccagcagaagactaccatctcaattgttccaattacaaattctggaaaaaatatgactggctaatcctgggtcaggtagctgctgttagtcctttaaggtacagcaaggtaggagatactataaaattcaaactaaacttcagaggcacttatgaaagtggagatagtgtgcagagaatcccaatcatatctcatttgcatttgcattttgtgctgggaatccatggaacccaagtgaaatctcaagagatttgtcagctcctcttggaattcagcatgtattaaaaaataatcaaagactgtaagattacagcttttggcccaaattcagaccacagacatctttcatttggccatgtggtattttttgtttgtttgttttctgagatggtcttgctctgtcacccaggctggagtgcagtggcgtgatctcagctcacttcaacctccacctcccaggctcaagtgcctcccacctcagcctcccaagtagctgggactacaggcatacaccaccatgcctggctgatatttctattttttatagagacaaggttttgccacatggcaaggctggtctcaaactcctgagcccaagcaatccactcgcctcagcctcccaaagtgctgggattgcaggcatgagccaccatgcctggcccccatctggtgttttaaacaatgtgaaattttacataaaaagtaaaacaatcaaaattactcagaagtgctcacttcaacagcacatacactaaaactgtaatctacagagaagactgttgtgtcccctgcacaagaataacacacaaattcattaagcattccatattttgcacagtccccagaaggtcatttatctgctgacaagcccgaagggaacagtatgagtcatagcaaaaaaaaaattaaaaatatccattgaatttggcagttaggaaatcatgagtaagcttgacaggtacattaactgggggaagcagtaaaggctgcctgcaataggacaactgaatga
